(19) United States
(12) Patent Application Publication
(10) Pub. No.: US 2025/0320496 A1
(43) Pub. Date: Oct. 16, 2025

(54) MODULATION OF ABCB11 GENE TRANSCRIPTION USING ANTISENSE OLIGONUCLEOTIDES TARGETING REGULATORY RNAS

(71) Applicant: CAMP4 Therapeutics Corporation, Cambridge, MA (US)

(72) Inventors: Brian E. Schwartz, Somerville, MA (US); Alfica Sehgal, Belmont, MA (US); David A. Bumcrot, Belmont, MA (US); Keerthana Gnanapradeepan, Stoneham, MA (US); Mateo John Rodriguez, Cambridge, MA (US); Rachana S. Kelkar, Malden, MA (US); Yuting Liu, Lexington, MA (US); Rutuja Sudhakar Pai, Charlestown, MA (US)

(21) Appl. No.: 19/196,169

(22) Filed: May 1, 2025

Related U.S. Application Data
(63) Continuation of application No. PCT/US2023/078736, filed on Nov. 3, 2023.
(60) Provisional application No. 63/382,281, filed on Nov. 3, 2022.

(51) Int. Cl. C12N 15/113; A61P 1/16

(52) U.S. Cl. CPC C12N 15/113; A61P 1/16; C12N 2310/113; C12N 2310/315; C12N 2310/321; C12N 2310/3231; C12N 2310/3341; C12N 2310/351

(57) ABSTRACT

Described herein are methods of modulating ABCB11 gene transcription using antisense oligonucleotides (ASOs) targeting regulatory RNAs, such as promoter-associated RNAs and enhancer RNAs. These methods are useful for increasing the expression of ABCB11 mRNA and protein to treat subjects having or at risk of developing cholestasis or a cholestatic liver disease, such as primary biliary cholangitis and progressive familial intrahepatic cholestasis.

### CROSS REFERENCE TO RELATED APPLICATIONS

[0001] This application is a continuation of International Application No. PCT/US2023/078736, filed on Nov. 3, 2023, which claims the benefit of U.S. Provisional Application No. 63/382,281, filed Nov. 3, 2022, each of which are hereby incorporated in their entirety by reference.

### SEQUENCE LISTING

[0002] The instant application contains a Sequence Listing which has been submitted via PatentCenter and is hereby incorporated by reference in its entirety. Said XML copy, created on Dec. 13, 2023, is named CTC-031WO_SL.xml, and is 8,339,905 bytes in size.

### BACKGROUND

[0003] Transcription factors bind specific sequences in promoter and enhancer DNA elements to regulate gene transcription. It was recently reported that active promoters and enhancer elements are themselves transcribed, generating noncoding regulatory RNAs (regRNAs) such as promoter-associated RNAs (paRNAs) and enhancer RNAs (eRNAs) (see Sartorelli and Lauberth, Nat. Struct. Mol. Biol. (2020) 27, 521-28). Unlike coding RNAs, regRNAs are transcribed bi-directionally. Various models have been proposed for the functions of regRNAs, including nucleosome remodeling (see Mousavi et al., Mol. Cell (2013) 51 (5): 606-17), modulation of enhancer-promoter looping (see Lai et al., Nature (2013) 494 (7438): 497-501), and direct interaction with transcription regulators (see Sigova et al., Science (2015) 350, 978-81).

[0004] Primary biliary cholangitis (PBC) is an autoimmune disease characterized by the progressive destruction of bile duct cells, leading to accumulation of bile acids and ultimately intrahepatic cholestasis. Cholestasis is the impairment of bile flow from the liver and is primarily responsible for liver injury. If left untreated, patients with PBC or cholestasis may ultimately require a liver transplant. There is no cure for PBC, and 30-40% of patients will not respond to the first line treatment, ursodeoxycholic acid (UDCA). Currently, the only approved second line therapy is obeticholic acid (OCA), which has demonstrated limited efficacy and a poor tolerability profile. Therefore, there is significant unmet need for new PBC and cholestasis therapeutics.

[0005] Gene expression has been generally known as an undruggable biological process. Despite on-going efforts into understanding the biology of gene transcription and regRNAs, clinically suitable methods of modulating gene expression are limited. There remains a need for new and useful methods for treating diseases associated with aberrant gene expression.

### SUMMARY

[0006] In one aspect, provided herein are antisense oligonucleotides (ASO) complementary to at least 8 contiguous nucleotides of a regulatory RNA of human ABCB11, wherein the regulatory RNA has a nucleotide sequence selected from the group consisting of SEQ ID NOs: 1-5 and 7-10.

[0007] In some embodiments, the ASO is complementary to a sequence in the regRNA that is no more than 200 nucleotides from the 3′ end of the regRNA.

[0008] In some embodiments, the ASO is complementary to a sequence in the regRNA that is no more than 200 nucleotides from the 5′ end of the regRNA.

[0009] In some embodiments, the regRNA is not a polyadenylated RNA.

[0010] In some embodiments, the regulatory RNA has a nucleotide sequence of SEQ ID NO: 1, and the ASO comprises a nucleotide sequence selected from the group consisting of SEQ ID NOs: 104-138, 217-272, 516-528, 645-1517, 5610-5644, 5723-5778, and 6018-6021.

[0011] In some embodiments, the regulatory RNA has a nucleotide sequence of SEQ ID NO: 2, and the ASO comprises a nucleotide sequence selected from the group consisting of SEQ ID NOs: 14-103, 273-381, 390-407, 463, 467-478, 515, 644, 1518-2057, 5520-5609, 5779-5887, 5896-5913, 5969, 5971-5980, and 6017.

[0012] In some embodiments, the regulatory RNA has a nucleotide sequence of SEQ ID NO: 3, and the ASO comprises a nucleotide sequence selected from the group consisting of SEQ ID NOs: 14-103, 139-148, 273-407, 463, 467-478, 515, 530-623, 625-644, 1518-2308, 5520-5609, 5645-5654, 5779-5913, 5969, 5971-5980, and 6017.

[0013] In some embodiments, the regulatory RNA has a nucleotide sequence of SEQ ID NO: 4, and the ASO comprises a nucleotide sequence selected from the group consisting of SEQ ID NOs: 149-168, 408-462, 464, 479-514, 2309-3956, 5655-5674, 5914-5968, 5970, and 5981-6016.

[0014] In some embodiments, the regulatory RNA has a nucleotide sequence of SEQ ID NO: 5, and the ASO comprises a nucleotide sequence selected from the group consisting of SEQ ID NOs: 169-216, 4062-5228, and 5675-5722.

[0015] In some embodiments, the regulatory RNA has a nucleotide sequence of SEQ ID NO: 7, and the ASO comprises a nucleotide sequence selected from the group consisting of SEQ ID NOs: 645-954.

[0016] In some embodiments, the regulatory RNA has a nucleotide sequence of SEQ ID NO: 8, and the ASO comprises a nucleotide sequence selected from the group consisting of SEQ ID NOs: 2309-2806.

[0017] In some embodiments, the regulatory RNA has a nucleotide sequence of SEQ ID NO: 9, and the ASO comprises a nucleotide sequence selected from the group consisting of SEQ ID NOs: 3957-4061.

[0018] In some embodiments, the regulatory RNA has a nucleotide sequence of SEQ ID NO: 10, and the ASO comprises a nucleotide sequence selected from the group consisting of SEQ ID NOs: 5229-5519.

[0019] In some embodiments, the ASO is no more than 50, 40, 30, or 25 nucleotides in length.

[0020] In some embodiments, the ASO comprises a RNA polynucleotide comprising one or more chemical modifications.

[0021] In some embodiments, at least 3, 4, or 5 nucleotides at the 5′ end and at least 3, 4, or 5 nucleotides at the 3′ end of the ASO comprise ribonucleotides with one or more chemical modifications.

[0022] In some embodiments, the one or more chemical modifications comprise a nucleotide sugar modification comprising one or more of 2′-O-C1-4alkyl such as 2′-O-methyl (2′-OMe), 2′-deoxy (2′-H), 2′-O—C1-3alkyl-O-C1-3alkyl such as 2′-methoxyethyl (“2′-MOE”), 2′-fluoro (“2′-F”), 2′-amino (“2′—NH2”), 2′-arabinosyl (“2′-arabino”) nucleotide, 2′-F-arabinosyl (“2′-F-arabino”) nucleotide, 2′-locked nucleic acid (“LNA”) nucleotide, 2′-amido bridge nucleic acid (AmNA), 2′-unlocked nucleic acid (“ULNA”) nucleotide, a sugar in L form (“L-sugar”), 4′-thioribosyl nucleotide, constrained ethyl (CET), 2′-fluoro-arabino (FANA), or thiomorpholino.

[0023] In some embodiments, the one or more chemical modifications comprise an internucleotide linkage modification comprising one or more of phosphorothioate (“PS” or (P(S))), phosphoramidate (P(NR₁R₂) such as dimethylaminophosphoramidate (P(N(CH₃)₂)), phosphonocarboxylate (P(CH₂)ₙCOOR) such as phosphonoacetate “PACE” (P(CH₂COO⁻)), thiophosphonocarboxylate ((S)P(CH₂)ₙCOOR) such as thiophosphonoacetate “thioPACE” ((S)P(CH₂COO⁻)), alkylphosphonate (P(C1-3alkyl) such as methylphosphonate —P(CH₃), boranophosphonate (P(BH₃)), or phosphorodithioate (P(S)₂).

[0024] In some embodiments, the one or more chemical modifications comprise a nucleobase modification comprising one or more of 2-thiouracil (“2-thioU”), 2-thiocytosine (“2-thioC”), 4-thiouracil (“4-thioU”), 6-thioguanine (“6-thioG”), 2-aminoadenine (“2-aminoA”), 2-aminopurine, pseudouracil, hypoxanthine, 7-deazaguanine, 7-deaza-8-azaguanine, 7-deazaadenine, 7-deaza-8-azaadenine, 5-methylcytosine (“5-methylC”), 5-methyluracil (“5-methylU”), 5-hydroxymethylcytosine, 5-hydroxymethyluracil, 5,6-dehydrouracil, 5-propynylcytosine, 5-propynyluracil, 5-ethynylcytosine, 5-ethynyluracil, 5-allyluracil (“5-allylU”), 5-allylcytosine (“5-allylC”), 5-aminoallyluracil (“5-aminoallylU”), 5-aminoallyl-cytosine (“5-aminoallylC”), an abasic nucleotide, Z base, P base, Unstructured Nucleic Acid (“UNA”), isoguanine (“isoG”), isocytosine (“isoC”) a glycerol nucleic acid (GNA), glycerol nucleic acid (GNA), or thiophosphoramidate morpholinos (TMOs).

[0025] In some embodiments, the one or more chemical modifications comprise 2′-O-methoxyethyl, 5-methyl on cytidine, locked nucleic acid (LNA), phosphodiester (PO) internucleotide bond, or phosphorothioate (PS) internucleotide bond.

[0026] In some embodiments, the ASO further comprises a GalNAc moiety, optionally a GalNAc3 moiety.

[0027] In some embodiments, the ASO does not comprise 10 or more contiguous nucleotides of unmodified DNA.

[0028] In some embodiments, the ASO does not comprise a deoxyribonucleotide.

[0029] In some embodiments, the ASO does not comprise an unmodified ribonucleotide.

[0030] In some embodiments, the length of the ASO is 5×n+5 nucleotides (n is an integer of 3 or greater), wherein the nucleotides at positions 5×m are ribonucleotides modified by LNA (m is an integer from 1 to n) and the nucleotides at the remaining positions are ribonucleotides modified by 2′-O-methoxyethyl.

[0031] In some embodiments, the length of the ASO is 3×n+2 nucleotides (n is an integer of 6 or greater), wherein the nucleotides at positions 3×m are ribonucleotides modified by LNA (m is an integer from 1 to n) and the nucleotides at the remaining positions are ribonucleotides modified by 2′-O-methoxyethyl.

[0032] In some embodiments, each ribonucleotide of the ASO is modified by 2′-O-methoxyethyl.

[0033] In some embodiments, each nucleotide of the ASO is a ribonucleotide modified by 2′-O-methoxyethyl.

[0034] In some embodiments, the ASO comprises 10 or more contiguous nucleotides of unmodified DNA flanked by at least 3 nucleotides of modified ribonucleotides at each of the 5′ end and the 3′ end.

[0035] In some embodiments, each cytidine in the ASO is modified by 5-methyl.

[0036] In some embodiments, the regRNA is an eRNA.

[0037] In some embodiments, the regRNA is an paRNA.

[0038] In another aspect, provided herein are pharmaceutical compositions comprising the ASO as described herein and a pharmaceutically acceptable carrier or excipient carrier.

[0039] In another aspect, provided herein are methods of increasing transcription of ABCB11 in a human cell, the method comprising contacting the cell with an ASO as described herein or a pharmaceutical composition as described herein.

[0040] In some embodiments, the cell is a hepatocyte.

[0041] In some embodiments, the ASO increases the amount of the regulatory RNA in the cell.

[0042] In some embodiments, the ASO increases the stability of the regulatory RNA in the cell.

[0043] In another aspect, provided herein are methods of treating or preventing cholestasis in a subject, the method comprising administering to a subject in need thereof an effective amount of the ASO disclosed herein or the pharmaceutical composition disclosed herein.

[0044] In some embodiments, the subject has or is at risk of developing a cholestatic liver disease.

[0045] In some embodiments, the cholestatic liver disease is progressive familial intrahepatic cholestasis (PFIC), Alagille Syndrome (ALGS), primary sclerosing cholangitis (PSC), neonatal sclerosing cholangitis, pediatric intrahepatic cholestasis (e.g., pediatric primary intrahepatic cholestasis or pediatric secondary intrahepatic cholestasis), benign recurrent intrahepatic cholestasis (BRIC), total parenteral nutrition associated cholestasis, paraneoplastic cholestasis, Stauffer syndrome, drug-associated cholestasis, infection-associated cholestasis, biliary atresia, intrahepatic cholestasis of pregnancy, primary biliary cholangitis (PBC), Dubin-Johnson syndrome, post-Kasai biliary atresia, post-liver transplantation biliary atresia, post-liver transplantation cholestasis, post-liver transplantation associated liver disease, intestinal failure associated liver disease, bile acid mediated liver injury, MRP3 deficiency syndrome, or gallstone disease.

[0046] In some embodiments, the subject has or is at risk of developing PFIC, and wherein the PFIC is PFIC type 3.

[0047] In some embodiments, the subject has or is at risk of developing PBC.

[0048] In some embodiments, the method results in a reduction in a symptom or a change in a disease-relevant laboratory measure of a cholestatic liver disease in the subject.

[0049] In some embodiments, the reduction in a symptom or change in the disease-relevant laboratory measure of cholestatic liver disease comprises a reduction in serum bile acid concentration, an increase in serum concentration of 7α-hydroxy-4-cholesten-3-one (7αC4), an increase in the ratio of serum 7αC4: serum bile acid, an increase in fecal bile acid excretion, a reduction in pruritis, a reduction in serum alanine aminotransferase (ALT) concentration, or a combination thereof.

[0050] In another aspect, provided herein are methods of treating primary biliary cholangitis (PBC) or cholestasis, the method comprising administering to a subject in need thereof an effective amount of the ASO as described herein or the pharmaceutical composition as described herein.

[0051] In some embodiments, administration of the ASO increases ABCB11 gene expression relative to a pre-administration baseline level.

[0052] In some embodiments, the ASO increases the amount of the regulatory RNA in a cell of the subject.

[0053] In some embodiments, the ASO increases the stability of the regulatory RNA in a cell of the subject.

[0054] In some embodiments, the cell is a hepatocyte.

### BRIEF DESCRIPTION OF THE DRAWINGS

[0055] FIG. 1A shows an illustrative schematic of eRNA, paRNA, mRNA, and natural antisense transcript (NAT) of a gene on the chromosome. The eRNA, paRNA, and NAT are all non-coding RNAs. The eRNA is transcribed bidirectionally from an enhancer of the gene. The paRNA is transcribed from the promoter of the gene, same as the mRNA, but in the antisense direction. The NAT is transcribed from a downstream promoter of its own in the antisense direction, such that the transcript overlaps at least partially with the mRNA. Generally, eRNAs and paRNAs upregulate gene expression whereas NATs downregulate gene expression. FIG. 1B shows an illustrative schematic of the interaction of regRNA with enhancer and promoter regions to recruit transcription factors and regulators that modulate gene expression. FIG. 1C provides a diagram of the identified regRNAs aligned with the human ABCB11 gene and active transcription sites.

[0056] FIG. 2A shows a dose-dependent increase in ABCB11 mRNA levels in primary human hepatocytes (PHHs) after treatment with ASOs CO-3986 (targeting paRNA RR63) or CO-4529 (targeting eRNA RR64). FIG. 2B shows a dose-dependent increase in ABCB11 mRNA levels (relative to beta-2-microglobulin (B2M)) in primary human hepatocytes after treatment with ASOs CO-3986, CO-4535 or CO-4556.

[0057] FIGS. 3A and 3B show that treatment of PHHs with ABCB11 regRNA targeting ASOs CO-3986, CO-4535, or CO-4556 induced increased expression of ABCB11 mRNA levels (relative to B2M) (FIG. 3A), and also induce increased expression of CYP7A1mRNA levels (relative to B2M) (FIG. 3B), both in a dose dependent manner.

[0058] FIGS. 4A, 4B, 4C, and 4D show that treatment of PHHs with ASOs including additional chemical modifications to parent ASOs CO-4535, CO-4529, CO-4517, and CO-3986 upregulated human ABCB11 mRNA expression greater than or equal to 1.5-fold as compared to untreated PHHs (“Untreated”). FIG. 4A shows ABCB11 mRNA levels in PHHs after treatment with derivative ASOs based on parent ASO CO-4535 (i.e., CO-7166, CO-7172, CO-7186, CO-7187, CO-7188, CO-7189, CO-7190, CO-7191, CO-7193, and CO-7194) as compared to untreated PHHs. FIG. 4B shows ABCB11 mRNA levels in PHHs after treatment with derivative ASOs based on parent ASO CO-4517 (i.e., CO-7141, CO-7148, CO-7149, CO-7150, and CO-7151) as compared to untreated PHHs. FIG. 4C shows ABCB11 mRNA levels of PHHs treated with derivative ASOs based on parent ASO CO-3986 (i.e., CO-7081 and CO-7082) as compared to untreated PHHs. FIG. 4D shows ABCB11 mRNA levels of PHHs treated with derivative ASOs based on parent ASO CO-4529 (i.e., CO-7175, CO-7178, CO-7179, CO-7180, CO-7181, CO-7182, and CO-7184) as compared to untreated PHHs. FC=fold change.

[0059] FIGS. 5A and 5B show dose-responsive increases in ABCB11 mRNA levels (FIG. 5A) and CYP7A1 mRNA levels (FIG. 5B), relative to B2M levels, on Day 4 (D4) in PHHs following treatment with the indicated concentrations of ASOs CO-4513, CO-4535 or CO-4556, as compared to untreated PHHs (“Untreated”), and PHHs treated with a control downregulating gapmer ASO targeting ABCB11 mRNA (CO-3760), or either 0.3 μM or 3 μM OBA.

[0060] FIGS. 6A and 6B show ABCB11 (FIG. 6A) or CYP7A1 (FIG. 6B) mRNA levels (normalized to respective untreated timepoint) in PHHs contacted with ASO CO-4535 as compared with control untreated PHHs at Days 2 (D2), 3 (D3), 4 (D4), 5 (D5), 6 (D6), 7 (D7). Strong ABCB11 and CYP7A1 gene upregulation was observed on Day 4 of treatment with ASO CO-4535 indicating effective bile acid efflux.

[0061] FIGS. 7A, 7B and 7C show that ABCB11 mRNA levels (FIG. 7A) and CYP7A1 mRNA levels (FIG. 7B) were upregulated in PHHs in a dose-responsive manner after treatment with ASO CO-3986 at the indicated concentrations, and that treatment of PHHs with 5 μM and 10 μM of ASO CO-3986 reduced cellular and extracellular bile acid levels as measured using a bile acid efflux assay (FIG. 7C).

[0062] FIG. 8A shows that treatment of mouse hepatocytes with ASOs CO-4755, CO-4765 and CO-4758, which target a mouse ABCB11 regRNA (RR54_v2) induced increased expression of Abcb11 mRNA. FIG. 8B shows increased ABCB11 mRNA levels (relative to geomean) in mouse hepatocytes following treatment with derivative ASOs based on parent ASO CO-4758 (i.e., CO-7212, CO-7214, CO-7215, CO-7216, CO-7237, CO-7238 and CO-7242) as compared to untreated PHHs (“Untreated”). FIG. 8C shows increased ABCB11 mRNA levels (relative to geomean) in mouse hepatocytes following treatment with derivative ASOs based on parent ASO CO-4765 (i.e., CO-7219, CO-7221 and CO-7227) as compared to untreated PHHs (“Untreated”). FC=fold-change.

[0063] FIGS. 9A and 9B shows that in vivo administration of ASO CO-3986 to humanized liver FRGR knockout mouse model mice induced increased human ABCB11 mRNA expression (FIG. 9A) and resulted in a decreased ratio of liver bile acid (BA) to serum BA (FIG. 9B), indicative of increased liver bile acid efflux.

[0064] FIGS. 10A and 10B show that ASOs targeting a mouse Abcb11 regRNA (RR54_v2), CO-4758 and CO-4765, increased both mouse Abcb11 and mouse Cyp7a1 gene expression in vivo in an alpha-naphthylisothiocyanate (ANIT)-induced cholestasis model (FIG. 10B), as compared to wild-type mice (FIG. 10B).

[0065] FIG. 11 provides ASO sequences and chemistries for exemplary ASOs targeting human ABCB11 regRNAs. Light gray shading indicates 2′-MOE; * indicates 5Me-C; dark gray shading indicates LNA; dark gray line indicates phosphodiester (PO) bond; white indicates DNA, black indicates GalNAc. FIG. 11 discloses SEQ ID NOs: 159, 418, 424,438-443, 445, 446, 153, 427, 430, 431-434, 436, 141, 393, 400-403, 26, 333 and 334, respectively, in order of appearance.

[0066] FIG. 12 provides ASO sequences and chemistries for exemplary ASOs targeting mouse ABCB11 regRNAs. Light gray shading indicates 2′-MOE; * indicates 5Me-C; dark gray shading indicates LNA; dark gray line indicates phosphodiester (PO) bond; white indicates DNA, black indicates GalNAc. FIG. 12 discloses SEQ ID NOs: 6022-6033, respectively, in order of appearance.

[0067] FIG. 13 provides ASO sequences and chemistries for exemplary ASOs targeting human ABCB11 regRNAs. Light gray shading indicates 2′-MOE; * indicates 5Me-C; dark gray shading indicates LNA; dark gray line indicates phosphodiester (PO) bond; white indicates DNA, black indicates GalNAc. FIG. 13 discloses SEQ ID NOs: 104-208, 18, 22, 19, 21, 20, 23, 24, 15, 17, 29, 34, 27, 33, 35, 31, 30, 32, 39, 46, 43, 38, 45, 37, 41, 42, 44, 53, 57, 48, 54, 56, 55, 51, 49, 52, 64, 63, 68, 61, 66, 59, 62, 67, 74, 78, 76, 73, 70, 77, 79, 75, 86, 87, 89, 81, 88, 83, 90, 84, 82, 97, 94, 98, 100, 92, 96, 95, 99, 14, 26, 36, 58, 60, 102, 91, 93, 80, 47, 71, 65, 85, 28, 40, 25, 72, 69, 101, 16, 50, 103, 209-216, 218-221, 223-231, 237-241, 233-236, 242-272, 274-280, 282-290, 292-300, 302-381, 383, 384, 390-394, 386-389, 395-407, 409-413, 415-423, 427-433, 425, 426, 434-462, 217, 222, 232, 273, 281, 291, 301, 382, 385, 408, 414, 424, 463 and 464, respectively, in order of appearance.

[0068] FIG. 14 shows ABCB11 mRNA levels in PHHs following treatment with ASO CO-11202 at the indicated concentration, or treatment with obeticholic acid (OCA; 5 μM), elafibranor (ELA; 10 μM), or fenofibrate (FF; 10 μM). FC=fold-change.

[0069] FIGS. 15A and 15B shows that in vivo administration of ASO CO-12367 to the humanized liver FRGR knockout mouse model mice induced increased human ABCB11 mRNA expression without affecting mouse Abcb11 mRNA expression (FIG. 15A) and resulted in a decreased serum bile acid (FIG. 15B). FC=fold-change.

### DETAILED DESCRIPTION

[0070] The present disclosure provides antisense oligonucleotides (ASOs) targeting regulatory RNAs, such as promoter-associated RNAs and enhancer RNAs, and methods of using these ASOs to regulate gene expression. These methods are useful for modulating the levels of gene products, for example, modulating expression levels of ABCB11, to thereby treat diseases associated with the accumulation of bile acids, such as primary biliary cholangitis (PBC) and cholestasis.

[0071] Various aspects of the compositions and methods described in the present application are set forth in the sections below.

### I. Definitions

[0072] To facilitate an understanding of the present application, a number of terms and phrases are defined below.

[0073] The terms “a” and “an” as used herein mean “one or more” and include the plural unless the context is inappropriate.

[0074] As used herein, the term “bile salt export pump,” “BSEP,” “ATP Binding Cassette Subfamily B Member 11,” or “ABCB11” refers to the gene of NCBI Gene ID: 8647 or Hugo Gene Nomenclature Committee (HGNC) ID: 42, or the protein of UniProt Accession No. O95342 (human) when used in reference to a human version of the protein, and to the protein of UniProt Accession No. Q9JL39 (mouse), when used in reference to a mouse version of the protein, and related isoforms and orthologs.

[0075] As used herein, the terms “regulatory RNA” and “regRNA” are used interchangeably to refer to a noncoding RNA transcribed from a regulatory element of a gene (e.g., a protein-coding gene), wherein the gene is not the noncoding RNA itself. Exemplary regulatory elements include but are not limited to promoters, enhancers, and super-enhancers. A noncoding RNA transcribed from a promoter, in the antisense direction, is also called “promoter RNA” or “paRNA.” A noncoding RNA transcribed from an enhancer or super-enhancer, in either the sense direction or the anti-sense direction, is also called “enhancer RNA” or “eRNA.”

[0076] As used herein, the term “nascent RNA” refers to an RNA that is still being transcribed or has just been transcribed by RNA polymerase and remains tethered to the DNA from which it is transcribed. An RNA that has dissociated from the DNA from which it is transcribed is also called an “untethered RNA.”

[0077] As used herein, the term “antisense oligonucleotide” or “ASO” refers to a single-stranded oligonucleotide having a nucleotide sequence that hybridizes with a target nucleic acid under suitable conditions or a conjugate comprising such single-stranded oligonucleotide. In some embodiments, the disclosure encompasses pharmaceutically acceptable salts of any of the ASOs described herein. Suitable pharmaceutically acceptable salts include, but are not limited to, sodium, potassium, calcium, and magnesium salts. In some embodiments, the ASOs provided herein are lyophilized and isolated as salts (e.g., sodium salts).

[0078] As used herein, in some embodiments, the stability of a regRNA is reversely correlated with the degradation rate of the regRNA. In some embodiments, where an ASO increases the stability of a regRNA, it reduces the degradation rate of the regRNA. In some embodiments, where an ASO decreases the stability of a regRNA, it increases the degradation rate of the regRNA. In some embodiments, the degradation rate of a regRNA can be measured by blocking synthesis of new regRNA and assessing the half-life of the existing regRNA.

[0079] As used herein, the terms “subject” and “patient” refer to an organism to be treated by the methods and compositions described herein. Such organisms preferably include, but are not limited to, mammals (e.g., rodents, primates, simians, equines, bovines, porcines, canines, felines, and the like), and more preferably include humans.

[0080] As used herein, the term “effective amount” refers to the amount of a compound (e.g., a compound of the present application) sufficient to effect beneficial or desired results. An effective amount can be administered in one or more administrations, applications or dosages and is not intended to be limited to a particular formulation or administration route. As used herein, the term “treating” includes any effect, e.g., lessening, reducing, modulating, ameliorating or eliminating, that results in the improvement of the condition, disease, disorder, and the like, or ameliorating a symptom thereof.

[0081] As used herein, the term “pharmaceutical composition” refers to the combination of an active agent with a carrier, inert or active, making the composition especially suitable for diagnostic or therapeutic use in vivo or ex vivo.

[0082] As used herein, the term “pharmaceutically acceptable carrier” refers to any of the standard pharmaceutical carriers, such as a phosphate buffered saline solution, water, emulsions (e.g., such as an oil/water or water/oil emulsions), and various types of wetting agents. The compositions also can include stabilizers and preservatives. For examples of carriers, stabilizers and adjuvants, see e.g., Martin, Remington's Pharmaceutical Sciences, 15th Ed., Mack Publ. Co., Easton, PA (1975).

[0083] Throughout the description, where compositions are described as having, including, or comprising specific components, or where processes and methods are described as having, including, or comprising specific steps, it is contemplated that, additionally, there are compositions described in the present application that consist essentially of, or consist of, the recited components, and that there are processes and methods according to the present application that consist essentially of, or consist of, the recited processing steps.

[0084] As a general matter, compositions specifying a percentage are by weight unless otherwise specified. Further, if a variable is not accompanied by a definition, then the previous definition of the variable controls.

### II. Antisense Oligonucleotides (ASOs)

[0085] ABCB11 (also known as the bile salt export pump or BSEP) is the only bile salt efflux transporter. Loss of both alleles leads to cholestasis (PFIC2). ABCB11 overexpression shifts the bile composition to more hydrophobic bile acids with higher affinity for FXR. This results in increased expression of bile acid responsive genes without increasing the bile acid pool and a decrease in new bile acid synthesis. Loss of one ABCB11 allele (resulting in 50% activity) is not disease-causing. However, loss of one allele in addition to polymorphisms on the remaining allele can result in sub-clinical forms of cholestasis (˜25% activity) (see, e.g., Yang and Park (2016) Korean J. Obes. 25 (4): 167-75, and Bull and Thompson (2018) Clin. Liver Dis. 22 (4): 657-669, both incorporated by reference in their entirety). Without wishing to be bound by theory, increasing the expression of the ABCB11 hepatic bile acid regulator will enhance bile flow from the liver and restore enterohepatic circulation of bile acids in subjects having or at risk of developing cholestasis or a cholestatic liver disease, including, e.g., PBC, Alagille Syndrome (ALGS), primary sclerosing cholangitis (PSC), biliary atresia, intrahepatic cholestasis of pregnancy (ICP), or progressive familial intrahepatic cholestasis (PFIC) (e.g., PFIC type 1 (PFIC1), PFIC type 2 (PFIC2) and PFIC type 3 (PFIC3).

[0086] In some embodiments, the antisense oligonucleotide (ASO) disclosed herein hybridize with or targets a regRNA (e.g., an eRNA or a paRNA) transcribed from a regulatory element of the ABCB11 gene, also referred to herein as an “ABCB11 regRNA”. It is understood that both eRNAs and paRNAs are regRNAs modulating (e.g., facilitating or upregulating) gene expression (FIG. 1). In some embodiments, the ABCB11 regRNA is a human ABCB11 regRNA. In some embodiments, the ABCB11 regRNA is a mouse ABCB11 regRNA. In certain embodiments, the target ABCB11 regRNA is an eRNA. In certain embodiments, the target ABCB11 regRNA is a paRNA. In certain embodiments, the ABCB11 regRNA is not a polyadenylated RNA. eRNAs can be identified using methods known in the art, such as Assay for Transposase-Accessible Chromatin using sequencing (ATAC-seq), global run-on sequencing, precision run-on sequencing, cap analysis gene expression, and histone modification analysis (see, e.g., Sartorelli & Lauberth, Nat. Struct. Mol. Biol. (2020) 27:521-28; PCT Application Publication No. WO2013/177248). paRNAs are RNAs transcribed from promoters of target genes in the antisense direction (transcripts in the sense direction are mRNAs of the target genes). They can be identified by similar methods, taking into account of their specific location and orientation. For the human ABCB11 gene, eRNAs have been identified to transcribe from the same bidirectional enhancer region. The nucleotide sequences of exemplary human and mouse ABCB11 regRNAs (eRNA and paRNA) are provided in Table 1 below. Any of these regRNAs are contemplated as a target ABCB11 regRNA of an ASO disclosed herein.

TABLE 1
Exemplary regRNAs

| SEQ ID | | |
|---|---|---|
| NO | Name | Sequence |
| 1 | RR62 v2 | AAAATTTCAAAAATGAAGGTGAAAACTATAAATTCCTCTGAGGGAGCCATTCCTAGTGTCTTTC |
| | (+) strand | TAGCCAAGATGTGCCCCACCCTTGATTCTTGAACCTGAATATGTGGGTTCCTATGTGCAAATAA |
| | eRNA | GCTGTTCTGAACTTGAGCCAGCATGAGGCACACTGCAAAGGCCATGCTATGACAGTGAGTCAGC |
| | Human | CCTGAGTACACGACAGACTCACTGATTACAAGGTGGCCTGTCAGGCTTATCACAAAGAAAACAG |
| | | TAGCATAGTGACTGTGTCTGTGTGAGTTCTGGCTACTTCTGCGTGGTTGCCTCTGATCACAGCA |
| | | CTGCCCTAGTTTTCTCACGCCTGTAATCTCAGCACTTTGGGAGGCTGAGGCAGGCAGATGACCT |
| | | GAGGAGATTGAGACCAGCCTGTCCAAAATGGTGAAACCCCATCTCTACTAAAAATACAAAATTT |
| | | AGCTGGGCATAGTGGCGGGCGCCTGTAATCCCAGCTACTCAGGAGGCTGAGTCATGAGAATCAC |
| | | TTGAACCCAAGAGGCAGAGGCTGCAGTGAGCCAAGATCACACCACTGTACTCCAGCCTGGGCAA |
| | | AAAAGGAGACTCCATCTTAAAAAAAAAAAAAAAAGAAAAAAGAAAAAAACAAACTCAACTACTG |
| | | GTTGAGACTAGTGTACCTTACTCAAAGTAATGCAGCCTGTTCATGAAATTCCCATTACAGATGG |
| | | AAGGGTTAAGATCAAGTGGATCACCAGCCACAGCCACAAAGCTAAGGGGCAGAGGGGAGTTGGT |
| | | GGGGGGGAAAAATAGAACTCTTGGAGATGATACTCAAGTAAAATTCATGGGTCACCTCCCTAGT |
| | | GACGTTAAGTATTGGTAGTGTCATGCTCAAGCCTATACTCAATAAAGTGGTAACATTTTGGCAA |
| | | TGTATTTGGTGAGTGACTTTCAATCCTGTTTCTATTAAGATTTTAAAACATAGTAAGATAGAAG |
| | | GAAACTTGAGGCAGAGTAATTTCTAGAAATATGGGTAAACTCATGTTTCTATTCTCTTTGTGTT |
| | | AGATACCACTCCAGCTCAGCCAGTAAAATCCCCTCTATACATTTTGAATTACAATTTAAGATAT |
| | | GAGCAAAAAAGTAAAAAATTAAAAACAAAAACAACCTACCCACAACGTGTTCCATTTGTCATGT |
| | | TCTGGTTGAGGGAACTGTTAGTCCATACAATGGTGTTATTCACACATGCTTTTCCTGGAATCTG |
| | | GAGTTCTTGTAACTCAACGTCGTAGTCAATAAAAACATCTGTCATTGTGCCAAAAATGAGTAGC |
| | | ACGCCTGGCTGGGCTATTCCATGGAGAAATGCACACAAACTTCCCACAAACATCAGCCAAATGT |
| | | CAGTTGATGAAGAAAACCGAAACTTGAAAAACAAAGGGTTCAGAGATCATCTATGGGTGAAGAG |
| | | CAGGAGAGGTAGGAGGACTACTTAATTTAGTTACTAGATTCTCATGAATAGTACTCAACACCAA |
| | | ATTTCATGGGAATCACCTTAATTGAGTGGCAGAGTTCGTATACTAATTATATTGAAATAAACGG |
| | | CACGGTACATCAATTATCTAAAACATTAGACTCTTACATTGTTAGATCATGTTATAAATTTCCT |
| | | GCTCTCTGAATTCATTCTGTTTATTTCAGGAGCTGACTTTCGTTTTTAGCTACTCATCTACAAC |
| | | TTAGGGGAAAATAATCACTGTCATTGATGCCATTGCCAAGTAGATAAACTGTGTGGGGCATTGA |
| | | GAAATACTATAAATTGTTTTGTTGAACTGATAGTGACTATGAAGAATGCCAATTTCTGCCTAGA |
| | | AATGCCTCCATCCTGAGAAAATTTGGAGTAAACACCTATACTTTAAAATTTCTAAAGATTTGTC |
| | | ATAAGAATAAATATATATATGTGATTGTTGTGATGACTTTCCTTACAAATATGATAACCATGGG |
| | | CTTAGTGATAATTTTCCAAGACATTTTTCTGATCTATTGGATAGGATTTGTATGCTTTATGAGC |
| | | AATATATTTCTAATAGTTATTCAGCATGTTATCACATAGGCAAAGCCTATGACTGAAAAAGTGA |
| | | TCACTGAAGTTAAAAACCTGCCAATATGACTAAAGATTTAACACTCCCCTCATGATCTAAACAA |
| | | TTTATAGCTGCACACCCACTGCCATAAATCAACACAGTTTTATTACCAATTGAAAGAAGCCAAC |
| | | TCTAACGCCATCACCTTTCTTCTCATCTTGTAACCTGATGAGAAAAACATAAGGATTTAAAGAC |
| | | CACCCTTTCCAATACAATGGGAAATTCTCCCTAGGTGGTGATTTTATGAGTTATTCTTTAGTAA |
| | | GAAAGAAAATCCCCACTGGCTGGAAAATTCTGGCCAAACCTAGTATCTTAAACACAAGCTTTAT |
| | | TCTTCTAGATTTCCCTCTTCTAGAGATTTCAGTATAGCTCAATCTCAGGTTCACTAGCGATTCA |
| | | CAGAGATGAACACCTGAGAGGTATGGAGAGAAAGTAAAAAGTCCTCTATACTCCCAGTTATACC |
| | | AACAAATAACTCTTTGCCCTCAGTCATGACCCTCAATCTATTTGTGACTGCATTTCCTCATGGG |
| | | TAAGTTGAAGTGGTTGGATTAGCTAATTTTAAAGCTTCCTCATGCTTAAAAATATTACAACTAC |
| | | ATTAAATAATGTTGATAATGATGAAAAATTCAAGAACATGCCCACACTTTTCATAGAATCATAT |
| | | TTCCTTAATATTTCCCATTCATTTCATTTCCCATAAGGCCATGTTTAACCTGTATTTGACCTCT |
| | | TCAACTTCGGGGATCTTGACTTAACCTGAGTCACGCAGTCCATGAATACACCCTGGACCTTGCT |
| | | GTCACCAGGAACTACTGTCTGACATGTTTAACTCCTTGGCACTCTGTGACTGCCCATGTACCTC |
| | | ATTTTCTCGCTTCCTTCCTCCTTCCACACCTATTTGTCAACCTCACTTGAGCCATGCAGTCCTT |
| | | TAAATCCTTCATTTCCTTCCATTGCTAAACCCCATTAAGATTTTGCTTCCTTCCCCATGCAGCC |
| | | AAGGTCCCTCTGCCAGGCATTTGAACCACACTCTCACCATCATCCTCAATTATTTTCTCTACAT |
| | | CATCCTTGTAAACTTCATCCTGCATCCATCCAGCTGTTTGCCCTCTTCTCCTTAAGCCAGGCTG |
| | | CTGGGCCTGCTGGACACAACCTCACCACCTTGTGAATGGATACCAACACAGGCAGAGTCTAGTA |
| | | CTCAGCTGCCCTAAGCTTCCCTTCTGGCCCAGAAAAGAATCCTAAATTTTTTCTGAGACTCCCC |
| | | ACGGTCTGGCCCTTGGCTCTCTGACCTCACCTCCTCCAACTATATTCTAGTTCTCAACACCCCA |
| | | CTTGCCTGGCCTCTTGCTGACCTTTGTCCATGCCCAACTGTTCCCACCTCTGGGTGCGGGCACC |
| | | TGCTACTCCTTCTCCCCAGGTGCATTTTCTTTAGGTAACCACAGGGACAGCTCCATCACCTCCG |
| | | CTAGACCTTCCTTTGAAATCACCTACTCAACAGAGTCTTGCCTGGCCAAAGTCTTTAAAATTTC |
| | | AACCCCACCCCCCACGCACCATTTCATAGCTCCATTTCCAGTTTATTTTTCCTTCTCAGAAAGA |
| | | AAGTGATAGATTATCACTAGCTACCATGCTATACATTTGATTTATTTACAATGTTTATTATATC |
| | | TCCCTCACTAAAATGTAAACTCCTCAAGGGCCAACATTTTTGCCTATTTTGTTCTTTTCTATAC |
| | | CCGCAGCACCTACAATAGTGTCTGATACCAAATAGACACTCAATATTTGCAAAACGAATGAATT |
| | | AATGGAGTGAATGTGTGCTCTCCAGCTCAACATGCAATGCACACTTCATTTCTCTGCGGATTGC |
| | | TCCCATTCTTCTCAGCAGCTCTGGCAAAATTTGCTGTGATCTTCTCATTCCATGCTCACCTCCT |
| | | CTAAAAACAAAGCAACTCATTCAACTTCCTACTCATCCTCTCCTTGCCATTCATCTACATCCAC |
| | | ACCCATTTTTTAAACTTCCCACGCAATAAGAAACGTGTGGCTCTCAGAGGCCCAGGCTGACCTG |
| | | ACCACTCCCAGCCCAAAGCTAATCTTACCACTCCCACTTCCTCCCTCTGCTGTGAATTACTTAA |
| | | AATTTCTAAAATACCTTTAACCCTTCCGTTTCCACCACCTCCACTTCAGGAACTTACCTGATGC |
| | | CTCACTTCTGTCTTCTAAATTAGACCTCATCTAATCCCGC |
| 2 | RR63 v1 | AAACATTTAATATATGCTAAGAAACAAAGAAAATAGAAAGGCATTATTTTCCAGATAAGCTCAC |
| | (+) strand | TGTCGGTTGATGCTGTGTGTCAACACTGTGGGTGACCCAGTCTGGGAATAGACTAAAATGAGGC |
| | paRNA | CCTTCCAGCCCTGAGGGCTATGGCTGATAGGGAAGGGAAATAAATACACGGTGATCCCATTGGC |
| | human | CACGTAAGTCCTTTCTTCAGAGGCACCGTTGAGGTAGAGGACTAAAGAATTGCTTAGGAAGAAA |
| | | ACAGAATGTAACACCAAAGTTAACTGCCACAGCGATTCTTTGTCTCTAAATGTACAGTTCTTTC |
| | | CTCTTTTTTTTTTTTTTTTTTTTTTTTTTTTGAGAGGAGTCTCGCTCTGTCGCCCAGGCCGGAC |
| | | TGCGGACTGCAGTGGCGCAATCTCGGCTCACTGCAAGCTCCGCTTCCCGGGTTCACGCCATTCT |
| | | CCTGCCTCAGCCTCCCGAGTAGCTGGGACTACAGGCGCCCGCCACCGCGCCCGGCTAATTTTTT |
| | | GTATTTTTAGTAGAGACGGGGTTTCACCGTGTTAGCCAGGATGGTCTCGATCTCTTGACCTCAT |
| | | GATCCACCCGCCTCGGCCTCCCAAAGTGCTGAGATTACAGGCGTGAGCCACCGCGCCCGGCCAG |
| | | TTCTTTCCTCTTGACCAAGCAAAACACAACTCCAGTATTTGATTTCTGCAATGAAACTTGGGCA |
| | | TTTTATGGCAATTGTAGCATCTTTTAAAACCACAAAATGGGCATTTTCCCCCTAAATAGCTTCT |
| | | TAATCCATTTTTAGGAGTCATCCCCTAATATTTGTCACCATTATTCTTGGTACTAGGAAACAAA |
| | | AATTATTCAAGGGGCTTGCAATCTAGAGTGGGGTGGAGTGTAAACAGAAGCTCCTAGACAGGGA |
| | | AATGGAGGCTTCAACCAGAGACAATCACAGTGTTACAGAGCACAGCAGGGGGAACCAAGGTGAG |
| | | GGGGGTGAGCAGTGAGGGGACGAGGTTGCCCACAGAAAAGAACTTCTATTAAACAACAGCTCAT |
| | | AAATAAGTTATCACTTCAAATGTTTAATAAAAACCACTACTAACTCCTAATATTAAAAAGTTTT |
| | | AGGTATAACCACTATAATTTGTCTCTAACATCTCTAAAAAGCTATTCCCCCTCAAAATGTTGAC |
| | | AAATACTGTCTTTTATTCCCAGTCTGAAGTGTGAATAATATTTGATCTCTGTGCTCAAGCCATT |
| | | AGCAATATGTGACTCCCACTGGCTTGGGTGACCTAAAAACTGAAATTAGATCCTAGAAACAAAC |
| | | TTTCTCCCCTCTAAACATGCATCCACAGCTCATTTTTTTTTGCATCTATATTTTTGAAAACCGG |
| | | GACAATGAAGAAATGAGTACGGTGTTGGAGAAAAGATAAAGTCGGTGTAGTTCTGCATTAAACC |
| | | AGCTTTCAAGGGTAGAATTTGTGATCATTGAATCTGTGATTATCAGAGCAAACAGAATTGTGCT |
| | | TTCACAAAGCCAAGTTAAAAAAGAAGCCCACTGGTATTTTTACTTTGAGCAGATTATTCAATCT |
| | | ATTCGGCCATTTGTACCACACACCCATGTACACCACTCTCTCTCTCTCTAAGAGATTGATACAT |
| | | GAAATAGCATTGCTATAAAGAAGACAGCAACCAAGAGTCATCTGTATTGTATACAATGTTGTGA |
| | | AATCATTAATGCATCCTGTAAGTTTCTATCCAAGTATTGTAGCGTTGTTTACACTGGACAAGAG |
| | | ACCAATGTTTAATAAACCAGAAACACTCCACTCCACAAAGTAAGAGTTAAAGGGAAGAGGGAAT |
| | | GGATTTGCAGAGACAAGTATAAGTTACTTACCTGTGAATATGAATTTGAGGAAGCCAGAGGAAA |
| | | TAATGGACTCCACTGTGGAGAGTTAAAAGGTTTCACAACCTTTTCCAACCTCGGTTTTCATCAT |
| | | TCTAAAGCACTGAACAGAATTCAAACTTTTTCAAGAACATTATCTATTTGCCTAAGGATCAATG |
| | | TCCCTAAGGGCAGCCCAAGCACAGTTCAGTGACATACGAGAAACATACTCAGAGCAATAACCCC |
| | | AAACACAGAGTGTGCTTGGGAAACCCTCTGAGGGTGTCAACAGGCCTTGGAAATTGCTGATTCA |
| | | CCTTGGAACGAGAGGCAAATTGAGCAGAGTGGGCCCAGCAAGAGCCCTGGAATTCAGGCTATCC |
| | | CAACCCTTATTTTTTACAGGCCTGTAGTTGTGAAAAGTTACTTAAAAACATAACAAGACAAAAA |
| | | AAAAAAATACCTTTAAACTTTCCCCCTCAATATAAAAGATTGCTCTTGGAAAATCCCTGGTTGC |
| | | AGGATCCAGATGCTCCTGGCCCAGCTATAGAGTTTTGTGGAGACAAATACCCTAAAAGAACATT |
| | | TGAAACAGCCTTGCTCAAAAGTCTGAGTGCACAGACAACTCTTGCACCCTGGCATGGACACACC |
| | | AGATGAAGCTCTGTATAAGCAAAGATGAACGATTTTCTAAAGGTTCAAATGAACAGGTCTTGAG |
| | | TCAAATAAGCATGTGGAGCTCCTCCAATATATTTGTGCTGCCTCTTCCTCTCCCTTCTTGTGAA |
| | | TCTTTCCATTTTTCCTACAATGTTCTTATTTTTTCTCCTTTGCCTGAGCTTACTTTTCCCTAAA |
| | | TGCCTCTCACTCCAGCCTTCAGCAATGAATAATAATAGGCAACATTGGTCAAGACTTGGTTGGG |
| | | TGCCTGGCCCAC |
| 3 | RR63 v2 | AAACATTTAATATATGCTAAGAAACAAAGAAAATAGAAAGGCATTATTTTCCAGATAAGCTCAC |
| | (+) strand | TGTCGGTTGATGCTGTGTGTCAACACTGTGGGTGACCCAGTCTGGGAATAGACTAAAATGAGGC |
| | paRNA | CCTTCCAGCCCTGAGGGCTATGGCTGATAGGGAAGGGAAATAAATACACGGTGATCCCATTGGC |
| | human | CACGTAAGTCCTTTCTTCAGAGGCACCGTTGAGGTAGAGGACTAAAGAATTGCTTAGGAAGAAA |
| | | ACAGAATGTAACACCAAAGTTAACTGCCACAGCGATTCTTTGTCTCTAAATGTACAGTTCTTTC |
| | | CTCTTTTTTTTTTTTTTTTTTTTTTTTTTTTGAGAGGAGTCTCGCTCTGTCGCCCAGGCCGGAC |
| | | TGCGGACTGCAGTGGCGCAATCTCGGCTCACTGCAAGCTCCGCTTCCCGGGTTCACGCCATTCT |
| | | CCTGCCTCAGCCTCCCGAGTAGCTGGGACTACAGGCGCCCGCCACCGCGCCCGGCTAATTTTTT |
| | | GTATTTTTAGTAGAGACGGGGTTTCACCGTGTTAGCCAGGATGGTCTCGATCTCTTGACCTCAT |
| | | GATCCACCCGCCTCGGCCTCCCAAAGTGCTGAGATTACAGGCGTGAGCCACCGCGCCCGGCCAG |
| | | TTCTTTCCTCTTGACCAAGCAAAACACAACTCCAGTATTTGATTTCTGCAATGAAACTTGGGCA |
| | | TTTTATGGCAATTGTAGCATCTTTTAAAACCACAAAATGGGCATTTTCCCCCTAAATAGCTTCT |
| | | TAATCCATTTTTAGGAGTCATCCCCTAATATTTGTCACCATTATTCTTGGTACTAGGAAACAAA |
| | | AATTATTCAAGGGGCTTGCAATCTAGAGTGGGGTGGAGTGTAAACAGAAGCTCCTAGACAGGGA |
| | | AATGGAGGCTTCAACCAGAGACAATCACAGTGTTACAGAGCACAGCAGGGGGAACCAAGGTGAG |
| | | GGGGGTGAGCAGTGAGGGGACGAGGTTGCCCACAGAAAAGAACTTCTATTAAACAACAGCTCAT |
| | | AAATAAGTTATCACTTCAAATGTTTAATAAAAACCACTACTAACTCCTAATATTAAAAAGTTTT |
| | | AGGTATAACCACTATAATTTGTCTCTAACATCTCTAAAAAGCTATTCCCCCTCAAAATGTTGAC |
| | | AAATACTGTCTTTTATTCCCAGTCTGAAGTGTGAATAATATTTGATCTCTGTGCTCAAGCCATT |
| | | AGCAATATGTGACTCCCACTGGCTTGGGTGACCTAAAAACTGAAATTAGATCCTAGAAACAAAC |
| | | TTTCTCCCCTCTAAACATGCATCCACAGCTCATTTTTTTTTGCATCTATATTTTTGAAAACCGG |
| | | GACAATGAAGAAATGAGTACGGTGTTGGAGAAAAGATAAAGTCGGTGTAGTTCTGCATTAAACC |
| | | AGCTTTCAAGGGTAGAATTTGTGATCATTGAATCTGTGATTATCAGAGCAAACAGAATTGTGCT |
| | | TTCACAAAGCCAAGTTAAAAAAGAAGCCCACTGGTATTTTTACTTTGAGCAGATTATTCAATCT |
| | | ATTCGGCCATTTGTACCACACACCCATGTACACCACTCTCTCTCTCTCTAAGAGATTGATACAT |
| | | GAAATAGCATTGCTATAAAGAAGACAGCAACCAAGAGTCATCTGTATTGTATACAATGTTGTGA |
| | | AATCATTAATGCATCCTGTAAGTTTCTATCCAAGTATTGTAGCGTTGTTTACACTGGACAAGAG |
| | | ACCAATGTTTAATAAACCAGAAACACTCCACTCCACAAAGTAAGAGTTAAAGGGAAGAGGGAAT |
| | | GGATTTGCAGAGACAAGTATAAGTTACTTACCTGTGAATATGAATTTGAGGAAGCCAGAGGAAA |
| | | TAATGGACTCCACTGTGGAGAGTTAAAAGGTTTCACAACCTTTTCCAACCTCGGTTTTCATCAT |
| | | TCTAAAGCACTGAACAGAATTCAAACTTTTTCAAGAACATTATCTATTTGCCTAAGGATCAATG |
| | | TCCCTAAGGGCAGCCCAAGCACAGTTCAGTGACATACGAGAAACATACTCAGAGCAATAACCCC |
| | | AAACACAGAGTGTGCTTGGGAAACCCTCTGAGGGTGTCAACAGGCCTTGGAAATTGCTGATTCA |
| | | CCTTGGAACGAGAGGCAAATTGAGCAGAGTGGGCCCAGCAAGAGCCCTGGAATTCAGGCTATCC |
| | | CAACCCTTATTTTTTACAGGCCTGTAGTTGTGAAAAGTTACTTAAAAACATAACAAGACAAAAA |
| | | AAAAAAATACCTTTAAACTTTCCCCCTCAATATAAAAGATTGCTCTTGGAAAATCCCTGGTTGC |
| | | AGGATCCAGATGCTCCTGGCCCAGCTATAGAGTTTTGTGGAGACAAATACCCTAAAAGAACATT |
| | | TGAAACAGCCTTGCTCAAAAGTCTGAGTGCACAGACAACTCTTGCACCCTGGCATGGACACACC |
| | | AGATGAAGCTCTGTATAAGCAAAGATGAACGATTTTCTAAAGGTTCAAATGAACAGGTCTTGAG |
| | | TCAAATAAGCATGTGGAGCTCCTCCAATATATTTGTGCTGCCTCTTCCTCTCCCTTCTTGTGAA |
| | | TCTTTCCATTTTTCCTACAATGTTCTTATTTTTTCTCCTTTGCCTGAGCTTACTTTTCCCTAAA |
| | | TGCCTCTCACTCCAGCCTTCAGCAATGAATAATAATAGGCAACATTGGTCAAGACTTGGTTGGG |
| | | TGCCTGGCCCACTTCAAAAATGTTATTTGTATCACCTCATTTGGGCCTCTCAACAGCCCTAGGA |
| | | GTTGGGTGCTATCATGTCATTTCTATTTTATAGTTGGGGAAACTGAAGCACAGAGAGGTTAAAT |
| | | AATCCTCCTAAGGTGTAACAACTAGTAGATGTGAAGCCACATGCCAGTCTGTGCTAACCTTCTT |
| | | CCACTCTGTGCTCTGAAATGCAATTGATGGGCCAGTGCTTCTTAATTTGCAGAAATTAAACTGT |
| | | AAGATCAAATTTTCTCAATTTTAGGTTTCTCTGTCATAAATTTTTTATTAAAATTC |
| 4 | RR64 v2 | AGTGCACACAGGCAACATTGAAAGGACCAAGATGGCTGCTGAGAGAAGAGGCAAAAAGTGGCTT |
| | (+) strand | GTAAATTTGCTTAAGTAGGTGAAGAAAGACAAAGAAGGGCTTTCAGTGCCAGTAGGATGAGTTG |
| | eRNA | CATGCAGTCTAAGATAAGAACTTCTGTTCACGGCCACCCAGGGCCAGTGTTTACAAAGCTGAGC |
| | human | CACAAGAAGGATGGGTTAGGCAGGAAGTCTTGCACATGCACACCAATCACAGAAGCTGGTTATT |
| | | ACCACCCTGAAAATCAATATAAATTGTGTAAAGCCAGCATGAGTCAGTTAACACAATATAATTG |
| | | GCTATGTTTTTTTGTGGCATAGAGACTAGCAGAGAGAAAAATGTCTAAATTAGAGCTTTCTTAG |
| | | GTAGCTTATGTATTTTTAAAGCAAGCTGTGTGGAAGGACACAATTTCTGTAGTTTAGTTGACTG |
| | | CAGAGGGAGGCAGAATGGTATAGTGAAAAGAGCACAGGCTTGTGAAGTCACAAAGAACTGGCTT |
| | | TAGATCCTGGTTTTGCCACTTACTTGTTGGATGATTTGGTTAAGGTAGTGATACTTGCTAATTA |
| | | TTTCCCCTCATGTGAAGTCCAGTAGGCCTTGAATAAGGGGAAATCGGTGTTGGGCAAAGGTGCT |
| | | CTGCTCCATGCAGTCATTCAGAGACCCAGGCTGACAGAAGCTCTACCATCCTCAACATGTGGCT |
| | | TTTAAGGTCTCCTTGGACATGGACATGTATCCATCACACAGGGAAGAGAAAATATGGAGCATTT |
| | | TGTATGGAAAGTTCCTGTGGGCCAATCCTGGAAGTGGCATCCATTACTTCTACTCAGATTCCAC |
| | | TGGAGAGGACTGTGCCACATAACCACACCTAACTGCAAGAAAGATTGGAAGATAAGGTCAGGCT |
| | | GTGTGTCTGGGAGGTTTAGTTAAAAGTTAACCAATCTCAAGAGATGGTCTTTGAAATCACAAAG |
| | | GTTTGTGTTCACTTACTAGCTATCTAACTTTGGACAAGTTACTTAATCTCCATTAGCCTCAGTT |
| | | TCTTCATCTGTAAAATGGGAGTGAGAATACCACCTGCACAGGATGATGAGGCCTGCCTGAACTT |
| | | CCCTGTGCCATAGATTCTGGATTGGGAGTTCCTCCCCCAAGTAGCCATTTAATTGAATTGTGTA |
| | | TATTTTTTTACCTACCAAAATTAGTGTATTCCTAATTTTGTCATGTACACATGTAGAAAAGACT |
| | | GGAAGAAGTACAATATAAAAAGTGCTTATCTGTAGGTTATGCAAATGTGAATGAGGGTGGTTTT |
| | | CATTTTCTTCCTCATGCTTTTCTGCATCTTCTAAATTATATACAATAAGGGTAAACTATTTTTT |
| | | AAACATATAAGTTATTAAATGAAAATAATGAATATGACAAAGGAAATATCAATAATAATGCATA |
| | | ATAAAATTTTATTAATGATTTTTAGAAATACATAGAGAGTACAACTATGTGGGTGTTCTCCAAA |
| | | TATTAGCTGTAGTTCAGTCATTGCTTTTTTTCTGGGAAAACTCTGACTTCTGCAGAAGGGATGG |
| | | GGCCGTCATCTGGACATCACAAGCAAAGTTTCTGTGGATTCAAAGCCCATTAAGAACTTGCTTT |
| | | ATCCTAACACAGACCAGCCCTGTGTCATGGTACCTGATGCTCCTGCTCAGTGGTGTGCCCTGAA |
| | | TGTCCTGAACCTGGAGGTAGATCCACCCTATCCCAGCTCTCTGCCTCATCTGGCTCTCCCAAAA |
| | | GCTGGCTATCACTGATCCCCTTTGGCTCAGTGCCTAGTTTGCTCCACCTCCACATCATGTCTGG |
| | | GTAGGGCTCCTGGAATTCCTTCAGGCCTCACTTGTGGGCCATTTAGAGTAAAATAGTGGGCACA |
| | | TACAACACTTCATTATGGTCTTCAAACCATGTTTCCTTTAAGATGATCTTAAGGACGAAAGTAA |
| | | GAAATAGTGAGTTGAGTAAGTCCAATGTATTATTAAATGTTTTATGCTCCCTCTGTAGAATTAA |
| | | TAACGCCAAATAAGACTAATTACAATCCTAGCAAGTTGTCATTTATAGTTATCTAAATGAAATA |
| | | CATTGATCTCCACAGCACTCAGTACTTGGTTAGAATTTATATTTTTGGTTCTCCCTCTAATGAG |
| | | GAAAACCAGCACAAAAAATATGGACTTCATTCATAAGCAAATCTTTTCTGATGTTTTTGAGTGC |
| | | GGTAGTTCTTGTCTTTCCCTGAAGGCTCATTATTGTGCATAAAGTTATAAAAATTATAAGGGTA |
| | | CCTTTATAATTGCCAAATGAAAAGAAATAGGTGAAATAAATAAAGAAGAGGAATCAGAGAGAAT |
| | | TCTGCTACAGAACAAAAGTCAATTATAAGTAATTGTGCCTGCAGTGTTGAATACTCATTTGAAC |
| | | TGTAGAATTTATCACTCGCAAGGGGCAAGTCTGCCTGGGGGTATGGGTAGATTGGATTTTCATG |
| | | TCTTGGCTTTATCCAGGACACCTCCCTTCTTAAAGTCATGTTTCAGTCGTGGAAACTATTCCTT |
| | | TGTT |
| 5 | RR74 v1 | AACTTGTCCAAAGTTAGATAGCTAGTAAGTGAACACAAACCTTTGTGATTTCAAAGACCATCTC |
| | (−) strand | TTGAGATTGGTTAACTTTTAACTAAACCTCCCAGACACACAGCCTGACCTTATCTTCCAATCTT |
| | eRNA | TCTTGCAGTTAGGTGTGGTTATGTGGCACAGTCCTCTCCAGTGGAATCTGAGTAGAAGTAATGG |
| | human | ATGCCACTTCCAGGATTGGCCCACAGGAACTTTCCATACAAAATGCTCCATATTTTCTCTTCCC |
| | | TGTGTGATGGATACATGTCCATGTCCAAGGAGACCTTAAAAGCCACATGTTGAGGATGGTAGAG |
| | | CTTCTGTCAGCCTGGGTCTCTGAATGACTGCATGGAGCAGAGCACCTTTGCCCAACACCGATTT |
| | | CCCCTTATTCAAGGCCTACTGGACTTCACATGAGGGGAAATAATTAGCAAGTATCACTACCTTA |
| | | ACCAAATCATCCAACAAGTAAGTGGCAAAACCAGGATCTAAAGCCAGTTCTTTGTGACTTCACA |
| | | AGCCTGTGCTCTTTTCACTATACCATTCTGCCTCCCTCTGCAGTCAACTAAACTACAGAAATTG |
| | | TGTCCTTCCACACAGCTTGCTTTAAAAATACATAAGCTACCTAAGAAAGCTCTAATTTAGACAT |
| | | TTTTCTCTCTGCTAGTCTCTATGCCACAAAAAAACATAGCCAATTATATTGTGTTAACTGACTC |
| | | ATGCTGGCTTTACACAATTTATATTGATTTTCAGGGTGGTAATAACCAGCTTCTGTGATTGGTG |
| | | TGCATGTGCAAGACTTCCTGCCTAACCCATCCTTCTTGTGGCTCAGCTTTGTAAACACTGGCCC |
| | | TGGGTGGCCGTGAACAGAAGTTCTTATCTTAGACTGCATGCAACTCATCCTACTGGCACTGAAA |
| | | GCCCTTCTTTGTCTTTCTTCACCTACTTAAGCAAATTTACAAGCCACTTTTTGCCTCTTCTCTC |
| | | AGCAGCCATCTTGGTCCTTTCAATGTTGCCTGTGTGCACTCATGCTGTATTTATGACCTGGTCC |
| | | CTCTCATACTTTGAGATATAACTCAAGTCCTTCCTTCTTTGAGAATCCATACTGATGGGTCACT |
| | | TTTTAAATACTTAAGGTCTGCATCAAACATTATAACATTTGCTGTTCTTCTTTTTTATTCTTAC |
| | | TTGGTTTATATACTAAGCTTTATTATCCTTTTAAGGTTAAAACTTTCTCAAGGACACTAACTGT |
| | | AATGTGTACAACTTGGTAGCCAGCGTAACATTTGACATAGTGTCTTGTAAAAAGAAGATACTCA |
| | | ATCAGTTTTTGAATGATTCAAAGAGTAAAATAATGGCAACTTCTTTTATCTCTTCCATAGTGCA |
| | | ATCTTCAATATTTTTTAAACAACTATTGGCTGAATTCTACCATTGTGGTTTAGAGCTTTCTCTG |
| | | AGACATTTTTGCTAAGGTTTTGAAACAGGTTCCAAATTGGTCCACAGTGACCTCCAAGGCTCTA |
| | | CAGGAGTGGTCCTCAAGCTTCAGCTCATTGGGCCCCACTCCCAGAGTTTCTGATTCAGTAGGTC |
| | | TCAGGAAAGGACCAAGAACATACATTCCTACTGGGTAATGAGGAGGCTGCTGCTGGTCCAGTAG |
| | | TCACACTTTCAGAGCCACTGCCCTGTGAGCTCATGGCACTCCATGATTCCCGCCACACTGACAT |
| | | AATCCCCAGCTGACTTCAGTCTTGCTTACTCCACTCCAGGTTCAGCTTCCTTACATACACCAGG |
| | | CATGCTCCTGCCCAGAGCTTTGCCCATGTGGTTTCCCCAGATACCCATGTACTTGTTCCTTTAC |
| | | CTCCCTCAGGTCATTCCTCATATGTCACCATCTCAGTGGGCCCTTCCATAAAACCCAGTTAAAA |
| | | ATGGCAACATCCTTCTCCCCTCACACGCTAACTGACACACACACATACACAAACACACTCTCTC |
| | | TCTCACACAGCATACGTACACACACTCCCTATCATATCCCTTTCCTGCAATGCTTTTCTCCATA |
| | | CCATTTACACCATCTGA |
| 6 | RR54 v2 | TTTTAATGACTTCAAGTCACAAAGACACTGAAGAATTTTTAGCATTAAATGTGGTGAAAAGCCG |
| | (+) strand | GGCAGCACTCAGGAGGCAGAGGCAGGCAGATTTCTGAGTTCGAGGCCAGCCTGGTCTACAGAGT |
| | paRNA | GAATTCCAGGACAGCCAGGGCTACACAGAGAAACCCTGTCTCGAAAAACCAAAAAGAAAAAAAA |
| | Mouse | TGTGGTGAAAGTACACTGAAAACAGAAAATTAGTAGAAAATAAATAAGGTCTTGTTTGTGAATT |
| | | TCCCCAGAAAAAAAAAATTCTAAAATTCTAAAAACAAATACAAAAAGAAGGAAGGAAGGAAGGA |
| | | AGGAAGGAAGGAGGGAGGGAGGGAGGGAGGGAGGGAGGGAGGGAGGGAGGGAGGAGAGGGGAGG |
| | | GGAGGGGAGGGGAGGGAAGGGAAGGGAAGGGAAGGGAAGGGAAGGGAAGGGAAGGGAAGGGAAG |
| | | GGAAGGGAAGGGAAGGAGAAAGAAAAAGAAAGAAAGAGAGAGAGAGAAAGAAAGAGAGAGAGAG |
| | | AATAAAAGAAAATATGTCTTAGGACTGGATGTTCGATGCCTTGCCTCATATAATTACAGTGTAG |
| | | AATGCAACCAATCTGTATTAGACCACATCTTCACCCATTGGCTGACTCAGGAACAGTCCTGGAA |
| | | ACGGCTTGTAGTAGTCCTGTTAGTCTCTGAAACCCTAGCAATGAGGTAGGAATCCGATTCTCAA |
| | | CGACAAACAGGTTTGGCAGGTGCTTGAGACTATGAGAAGGTTTTTTTTGTTGTTTGGTTTGTTA |
| | | GTTGTTTTGTTTTGTTTTGTTATCAACTGAAGCAGTCACAATGTTGCTGAGTCCTACTTTTTCA |
| | | GCTCATATCTTATAATGTCCAATTAGCACCTAAACTATTTTAATCCATTGCCAAAAACTATAAT |
| | | CAGAATTTCTTAATAATTTACAGTAATAAAAATTTTAAATTAATAACACATAATTCAGAGCTGA |
| | | AAACAAAATTTAATGTTATTCGCTTTTCCTCTGAAATTCCATGTAATGAATTATTTTTATCTCT |
| | | CCCAAATCTCTGAGGAAAGGACTGAGAATTTTCAAGCCTTTCAGAAAAATCAATTTTCTGTAAC |
| | | ATCGGAGAATCTAGCAGTTTAAAGCAGGAAATTAAGATTTCTACATAATGGTTATCTGACTTGG |
| | | CTGTGTAAGTAGGAACACCTCAAGAACTCTTATTTGACCACAAAACCCCCAGTGTCCCTCTCTG |
| | | TTCCATGACATGTGATATTTAACCTGCCTACTATATATATGTGCTTCTGTTCAACTAGGGTGAA |
| | | GTTTCCTTTTGATAAAAGATGGAATCTTATCAATTCAGAGCCGAACACTGGAGGTCAGTCCCAT |
| | | GACCATAACTGGTAGCCTCAGCAGTGACTTTTCTATCTTAGAACATTTGCATCAGCTCCTGGAA |
| | | GAGCACAGTCGAGCAGAAGGGTGGAGCCCAGCGTCTGCATGGATTGTCCTTGAGAACCTAAGGG |
| | | ATGAGAGCATCCAGCGATGGGGACGAATGAGGGGCCTCCGAGATACTCCAGATGAAAGGGGACA |
| | | AACACAGGCTCCTGTGAGCCACGCAGGTACAGGACAAAAAGTCAAGGTCCTCCAGTTTCTTGTG |
| | | TGCATCTCATGGTGGCCAAGGTGCTTTGTGACTTGGTGGAAATACCAGGCTAGAGCAGCACATG |
| | | AATGGGCTGAACTTCTCTAAGGGCCTGGTCCACACTAACAGCTGAGTCTGGTATTGCAAATAAG |
| | | AAGGAAGGGAGGGAGGGAGGAAGGGAGGGAGAGAGGGAGGAAGGAAGGGGGAGAGGGAGGAAGG |
| | | AAGAAGAAATGGATTCTCAGAAGCTGGTCTCAGAATGAAGAATCCTACAATCCTACTGCAGTAA |
| | | GAGCAAGGACCCCGCCGTTCCCCCTCCCTCTCTGAATCATGATTTTATTGAAATATAGTTATTA |
| | | CACTCATCATTTTGTTGTCTTTGGTTGCGTCATCGAGGATCTCTGACACAAAGTGAATGTTCCT |
| | | GCTGCATTCACTCTCGGGCTCTTTACGGAAGAGCCTTCTGCACTGGGTGTCCTCTTCCCATCCC |
| | | AGCCACACAAAGTCAGTTCAGAACAGTGGGGGAGTTCTCAAGGAGGTTACTTCCCGACTAAAAT |
| | | ATTTAGTGTGCCAAACCTTGTAACCTGATTTACCCTAGTGGAGCTTCCGGAGGGGACAGAAGAC |
| | | AGGTGACAGAATTCATGGAAAACTACAGACCTTGGCTGAGGGAGAAGCATGGGCACTAGCCTGG |
| | | GAAGGCTCTGGAATGTGCATATTCACCTTGGATTTGGGAGGAAAACCCAAAGTAGACAAGGGAA |
| | | GGTGGAGAGGAGGGAAGAACACATAGAAGGCCCAGACCCCAGAGACAGAATAGGAGCAAGGGAC |
| | | GAAGGATGGACTCCCCACTAGGTCTGGGGAGTACAGGGCCATCTCTGGAGCAGCTGTCGATCCC |
| | | TTGGTTCCTTGTGATCTTTAACCCTGGGGATTGGGGCTTTATCCTGAGAACAACGGAAGCTAGT |
| | | GAGGGGTTAACACTTTAACATCTCCGATAAGTCTTGGGATTTTGTGATTATTAGTTCAAATCAT |
| | | GCTTCTATAATGCCAAGTTTAAAGGACATCTCTCTGGGGTTTTTATTTTGGGTGATCTCTTTTT |
| | | TCAATCCATTCACCTAATTTTGCCACACACACACACACATTTTTGAGACAACTGAAGTACAAAA |
| | | TAGCACTGCTGTAAGACCGTTACCAGGCCTCCCTCACTGTATATAATACTAAGAAGTCAGCCAT |
| | | TTGTCTTCACACGTCTACCCAAGCACTGTAGCTTTACTGGATGACAAGGTTGGGCTTTTGGTAA |
| | | ATCTGAACCACAACCCTCCCCCATAAACTGAGACTACCAAATAAAACAGACTCGGAAAGCAAAG |
| | | ACTTAAAAAACGCCATAGGCAAATGAGAGTCACTTACCTACAGATGTGAATTTGAGGGAGCCAG |
| | | GAGAAGCGAGAGACGCCACTGTGGAAAGTCAGGGTTGTACACCCCTTTCCAAGTTCAGTTTTCA |
| | | TGGTAATAAAGCATTGAACAGAAATCAGGCTTTTTTAAGAACACTATCTATTTGCTTATAGGTC |
| | | AATGGCCTAAAGTCCAGATCTAGCACAGTTCAGTGACATGAGAGGAAAGGTCGAACATACTCAA |
| | | AGCAGGAACCCAAACCCAGAGTGCGTGGGGACCTTCTGAGGGTATCAACAAGCTTTAGAAAATG |
| | | CCCAGTTGCCCGAGAGTGGGGCCTCATGGTAGAGAGCCTGGTGAGAGGCCCGACTCTTCTTTTT |
| | | TAAGCCCTAGGTTTTAAAAAGTAACTTTAAAAAAATCTAACAGGACCAAACTACTTCTTATCGT |
| | | CTCTGCTCTATTTGAAGTGACCCTTGTGACATCCTGGGTTGCAGGCCCTCAGTGATCTGGAGCC |
| | | AGCCCCAAAGTTTCATGGAGAATTGATAACATGCAATTGCCTTCTGCTCAGAACTCTGTGCACA |
| | | CAGATGACCCTTGAACTCTGGTCTGAGCAGTCAATAGCCTCAAGCTCTGCCCACTAGCTGCAGC |
| | | GCTGTATAAGTAGAAATGCATTACTTTAAAAAACACATTCCCATTAACAAAACCTCAAAGCAAA |
| | | TAAGCTTAGAACTGGCTGTGACTTTTCGTATGCCTTCTTACTATTAATCTCCACATATTTCTTT |
| | | AAAAAAACAAGTTTTACCATTTTTCTTCTTCATTAATTTCAATTGCATTGTATTATAAAAAGTA |
| | | ATATGGCCATATGATTCAAAATGCTATTTAGTTTTTATATTTCTTCCTGGAAAGGGGATGTAAG |
| | | ATTGTTACTGGACATGGGGTCCCAACTTGTGCTCCAAGTCAGAACCGATCAGCTGCCTTCTATA |
| | | GGCCAATAAAATAGCCAAGTTAGTAATAGAAAGCAGAGAAAGGAGATTTATTCAGTGTTCCACA |
| | | TTGGGAAAAAAATACAGAGATCCAGTGTATATCCAGTTTTGGGCTCCTGAAATGAGACCAGAAT |
| | | TTAATTAGAACACCAAATGCACATCTTAGCAGTGCCAGTTAAAATATGATCCTGCCCACCACTG |
| | | ACTGGGCTTCAGGCTGGTTCCTGAAGTGGTCTACCAAGTTGTGAGACTTGTGTGAAGTCTCAAG |
| | | AGACTAGTTCTTGCTCTGGCTGGTATCTCTTTCTTCTCCCAGAGTGAGATTCCTGAGGAAATTT |
| | | CAATTTGGAGGTGGGAGGACCAGATTCACTACAGTAGTCTGATGGTCAGATGGAGAGACACATA |
| | | GCATCTCTTTACACTATCTTCATTTCTTCCAGGCCAGAGAGAGGACAAGAAAAAAGGCTGAGCT |
| | | TGCAAGACTGTGGTTCTTAAAGCATACCCACCACACCAGAGATGGCTACTGAGCATAAAGGTTA |
| | | CAATACAGTGGTATGCATGCTTACCTAAGAAGGTGAAGGTAGGCCAAGAACAGTTTTCAGAATC |
| | | AAGGAGATGAATTGCAGACAGACTGGAATGTTAGCCCTGTGGCTCAGAATAATAGGAATGGTTT |
| | | TGTGGAGAAGTCTTCCACCAACTATCAACTCTTGTTTGGTTATTATAGCCCTGCAGATCAAAAT |
| | | GAATTGGAAAAACTCAACACCAATTATCTAACACAACATAATTGGCTGTACTTTGGTAGAGTAG |
| | | GGAGGTTTAACTCATTACAGAGAGAAGCAAAAGGAACTGGCTTCATAATTAGGTTCTAGCACTT |
| | | GCTTCTCGATTTAGCTATGGTAATGATGCTTGCTCTACTGGCTGGTTTTGTGTGTCAACTTGAC |
| | | ACAAGCTGGAGTTATCACAGAGAAAGGAACCTCCCTTGAGGAAAGACCTCCATAAGATCCAGCT |
| | | GCAAGGCATTTTCTCAATTAGTGATCAAGGGGGGAGGGCCCATTGTGGGTGGTGCCTTCCCTGG |
| | | GCTGGTAGTCTTGGATTCTAGAAGAAAGCAAGCTGAGCAAGCCAGGGGAAGCAAACCAGTAAGG |
| | | AACATCCCTCCATGGCCTCTGCATCCGCTTCTGCTTCCTGACCTGTGTGAGTTCCAGTCCTGAC |
| | | TTCTTTTGGTGATGAACAGCAATGTGGAAATGTAAGCTGAATAAACCCTTTCCTCCCC |
| 7 | RR62 v1 | AAAATTTCAAAAATGAAGGTGAAAACTATAAATTCCTCTGAGGGAGCCATTCCTAGTGTCTTTC |
| | (+) strand | TAGCCAAGATGTGCCCCACCCTTGATTCTTGAACCTGAATATGTGGGTTCCTATGTGCAAATAA |
| | eRNA | GCTGTTCTGAACTTGAGCCAGCATGAGGCACACTGCAAAGGCCATGCTATGACAGTGAGTCAGC |
| | Human | CCTGAGTACACGACAGACTCACTGATTACAAGGTGGCCTGTCAGGCTTATCACAAAGAAAACAG |
| | | TAGCATAGTGACTGTGTCTGTGTGAGTTCTGGCTACTTCTGCGTGGTTGCCTCTGATCACAGCA |
| | | CTGCCCTAGTTTTCTCACGCCTGTAATCTCAGCACTTTGGGAGGCTGAGGCAGGCAGATGACCT |
| | | GAGGAGATTGAGACCAGCCTGTCCAAAATGGTGAAACCCCATCTCTACTAAAAATACAAAATTT |
| | | AGCTGGGCATAGTGGCGGGCGCCTGTAATCCCAGCTACTCAGGAGGCTGAGTCATGAGAATCAC |
| | | TTGAACCCAAGAGGCAGAGGCTGCAGTGAGCCAAGATCACACCACTGTACTCCAGCCTGGGCAA |
| | | AAAAGGAGACTCCATCTTAAAAAAAAAAAAAAAAGAAAAAAGAAAAAAACAAACTCAACTACTG |
| | | GTTGAGACTAGTGTACCTTACTCAAAGTAATGCAGCCTGTTCATGAAATTCCCATTACAGATGG |
| | | AAGGGTTAAGATCAAGTGGATCACCAGCCACAGCCACAAAGCTAAGGGGCAGAGGGGAGTTGGT |
| | | GGGGGGGAAAAATAGAACTCTTGGAGATGATACTCAAGTAAAATTCATGGGTCACCTCCCTAGT |
| | | GACGTTAAGTATTGGTAGTGTCATGCTCAAGCCTATACTCAATAAAGTGGTAACATTTTGGCAA |
| | | TGTATTTGGTGAGTGACTTTCAATCCTGTTTCTATTAAGATTTTAAAACATAGTAAGATAGAAG |
| | | GAAACTTGAGGCAGAGTAATTTCTAGAAATATGGGTAAACTCATGTTTCTATTCTCTTTGTGTT |
| | | AGATACCACTCCAGCTCAGCCAGTAAAATCCCCTCTATACATTTTGAATTACAATTTAAGATAT |
| | | GAGCAAAAAAGTAAAAAATTAAAAACAAAAACAACCTACCCACAACGTGTTCCATTTGTCATGT |
| | | TCTGGTTGAGGGAACTGTTAGTCCATACAATGGTGTTATTCACACATGCTTTTCCTGGAATCTG |
| | | GAGTTCTTGTAACTCAACGTCGTAGTCAATAAAAACATCTGTCATTGTGCCAAAAATGAGTAGC |
| | | ACGCCTGGCTGGGCTATTCCATGGAGAAATGCACACAAACTTCCCACAAACATCAGCCAAATGT |
| | | CAGTTGATGAAGAAAACCGAAACTTGAAAAACAAAGGGTTCAGAGATCATCTATGGGTGAAGAG |
| | | CAGGAGAGGTAGGAGGACTACTTAATTTAGTTACTAGATTCTCATGAATAGTACTCAACACCAA |
| | | ATTTCATGGGAATCACCTTAATTGAGTGGCAGAGTTCGTATACTAATTATATTGAAATAAACGG |
| | | CACGGTACATCAATTATCTAAAACATTAGACTCTTACATTGTTAGATCATGTTATAAATTTCCT |
| | | GCTCTCTGAATTCATTCTGTTTATTTCAGGAGCTGACTTTCGTTTTTAGCTACTCATCTACAAC |
| | | TTAGGGGAAAATAATCACTGTCATTGATGCCATTGCCAAGTAGATAAACTGTGTGGGGCATTGA |
| | | GAAATACTATAAATTGTTTTGTTGAACTGATAGTGACTATGAAGAATGCCAATTTCTGCCTAGA |
| | | AATGCCTCCATCCTGAGAAAATTTGGAGTAAACACCTATACTTTAAAATTTCTAAAGATTTGTC |
| | | ATAAGAATAAATATATATATGTGATTGTTGTGATGACTTTCCTTACAAATATGATAACCATGGG |
| | | CTTAGTGATAATTTTCCAAGACATTTTTCTGATCTATTGGATAGGATTTGTATGCTTTATGAGC |
| | | AATATATTTCTAATAGTTATTCAGCATGTTATCACATAGGCAAAGCCTATGACTGAAAAAGTGA |
| | | TCACTGAAGTTAAAAACCTGCCAATATGACTAAAGATTTAACACTCCCCTCATGATCTAAACAA |
| | | TTTATAGCTGCACACCCACTGCCATAAATCAACACAGTTTTATTACCAATTGAAAGAAGCCAAC |
| | | TCTAACGCCATCACCTTTCTTCTCATCTTGTAACCTGATGAGAAAAACATAAGGATTTAAAGAC |
| | | CACCCTTTCCAATACAATGGGAAATTCTCCCTAGGTGGTGATTTTATGAGTTATTCTTTAGTAA |
| | | GAAAGAAAATCCCCACTGGCTGGAAAATTCTGGCCAAACCTAGTATCTTAAACACAAGCTTTAT |
| | | TCTTCTAGATTTCCCTCTTCTAGAGATTTCAG |
| 8 | RR64 v1 | AGTGCACACAGGCAACATTGAAAGGACCAAGATGGCTGCTGAGAGAAGAGGCAAAAAGTGGCTT |
| | (+) strand | GTAAATTTGCTTAAGTAGGTGAAGAAAGACAAAGAAGGGCTTTCAGTGCCAGTAGGATGAGTTG |
| | eRNA | CATGCAGTCTAAGATAAGAACTTCTGTTCACGGCCACCCAGGGCCAGTGTTTACAAAGCTGAGC |
| | human | CACAAGAAGGATGGGTTAGGCAGGAAGTCTTGCACATGCACACCAATCACAGAAGCTGGTTATT |
| | | ACCACCCTGAAAATCAATATAAATTGTGTAAAGCCAGCATGAGTCAGTTAACACAATATAATTG |
| | | GCTATGTTTTTTTGTGGCATAGAGACTAGCAGAGAGAAAAATGTCTAAATTAGAGCTTTCTTAG |
| | | GTAGCTTATGTATTTTTAAAGCAAGCTGTGTGGAAGGACACAATTTCTGTAGTTTAGTTGACTG |
| | | CAGAGGGAGGCAGAATGGTATAGTGAAAAGAGCACAGGCTTGTGAAGTCACAAAGAACTGGCTT |
| | | TAGATCCTGGTTTTGCCACTTACTTGTTGGATGATTTGGTTAAGGTAGTGATACTTGCTAATTA |
| | | TTTCCCCTCATGTGAAGTCCAGTAGGCCTTGAATAAGGGGAAATCGGTGTTGGGCAAAGGTGCT |
| | | CTGCTCCATGCAGTCATTCAGAGACCCAGGCTGACAGAAGCTCTACCATCCTCAACATGTGGCT |
| | | TTTAAGGTCTCCTTGGACATGGACATGTATCCATCACACAGGGAAGAGAAAATATGGAGCATTT |
| | | TGTATGGAAAGTTCCTGTGGGCCAATCCTGGAAGTGGCATCCATTACTTCTACTCAGATTCCAC |
| | | TGGAGAGGACTGTGCCACATAACCACACCTAACTGCAAGAAAGATTGGAAGATAAGGTCAGGCT |
| | | GTGTGTCTGGGAGGTTTAGTTAAAAGTTAACCAATCTCAAGAGATGGTCTTTGAAATCACAAAG |
| | | GTTTGTGTTCACTTACTAGCTATCTAACTTTGGACAAGTTACTTAATCTCCATTAGCCTCAGTT |
| | | TCTTCATCTGTAAAATGGGAGTGAGAATACCACCTGCACAGGATGATGAGGCCTGCCTGAACTT |
| | | CCCTGTGCCATAGATTCTGGATTGGGAGTTCCTCCCCCAAGTAGCCATTTAATTGAATTGTGTA |
| | | TATTTTTTTACCTACCAAAATTAGTGTATTCCTAATTTTGTCATGTACACATGTAGAAAAGACT |
| | | GGAAGAAGTACAATATAAAAAGTGCTTATCTGTAGGTTATGCAAATGTGAATGAGGGTGGTTTT |
| | | CATTTTCTTCCTCATGCTTTTCTGCATCTTCTAAATTATATACAATAAGGGTAAACTATTTTTT |
| | | AAACATATAAGTTATTAAATGAAAATAATGAATATGACAAAGGAAATATCAATAATAATGCATA |
| | | ATAAAATTTTATTAATGATTTTTAGAAATACATAGAGAGTACAACTATGTGGGTGTTCTCCAAA |
| | | TATTAGCTGTAGTTCAGTCATTGCTTTT |
| 9 | RR65 v1 | AAAGAACAGTACAACTAAGTGATTCTTCAATGACTCATCTCAAATCTTCATTCCGATGACTTCT |
| | (+) strand | CAAGGCTTCGCTGAGTGATCCCTCACCCAAATGATTATTGACTTCCCTCTCCTCCCTCACCCCA |
| | eRNA | GATTTCTCATGTGTCACTGCCAATTCAAATTCATGGCTAAAGCACTAATCTCTTTCCACACCTC |
| | | TACTTCCTGGAATCCTTTCTTGTTATCAGTCTTATATCTATGCCCAATTCAGCCAGCCATTGGG |
| | | GTAATGAACTTTCCATTCTAGAACCACAGTCCAATTTGCCTGTTACCTCACTGAGAAGGCTCTG |
| | | GGGCTCTGACAAACACTGCTGTGAGTTTCCTGAAACCTACTTTTTTTTTTTTTTTTTTTTTTTT |
| | | TTTTAACTTTTATTTCAGGCTCAGGAGTACCTGTGCAGGCTTGTTATATAGGCAAACTCCTGTC |
| | | ATGAGGATTTGATGTACAGATTATTTCATGACCCAGGTACTAAGCCTAGTAACTCAATAGTTAA |
| | | TTTTTCTGCTCCTCTCCCTCCCCCCATCCTCCACCCTCCAATGGGCCCCCAGTGTCTGTTGTTC |
| | | CCCTCTTTGTGTCCATGAGTTCTCATCATTTAGTTCACACTTACTGGAAACCTCCTTTGGCCAC |
| | | ATTTTGACACTATGTCAGGAGAGGTTGGATCCTCCAACCCCTGCCGAGATCACTGCAGATACTT |
| | | AGAGCCTGGATAAGATGATCAACAGTGCTTTAAATAGCTTATATTTTAAAAAGCTGTGCTGAAT |
| | | GTTTTGCAGGCCACTGAGGTGCGGACATGGTTTTATATCAGTGAGATCACAGGTGAGCAAGGTG |
| | | TTATTGGCTATAATGTTTGAAAATCAGCCTTTAACATCTGATTATATTTGACTTCTTATTTGAG |
| | | TGTCCTTGGACCATGTGTGATCAGACTGCTATGTGAATAAAATAAGATAATGTATAAATTTTCT |
| | | ATAACTTCTTCATGCATAAAATCCTATTAACATTGCTGAT |
| 10 | human | ATGCAGTTTTTCAGTTAAATTCTATTCTCATTTATAGCACAGTTTTAGTATGCCTGATTCCATA |
| | RR84 v1 | ACGTGCTATCTAATGTGGCTGCTCTAATAATAATTTCTCAGTCCTTGGGAGTGTTTTTAGCTGA |
| | (+) strand | TGTGACCCGAAATTCCTATTCCTATATGTTGTCCAGGCCTCAATTCCTGGGGAACCGAGACAGT |
| | eRNA | GACTGGGATAACTCTTGGAATGGGTCAGATCACCTCTCTCTGAAAGAGGTTATCTGAAAGATAA |
| | human | GATGAAATGGAGAACACAGTTGTGATTGCAGAAATCCTTCTTGTGTGCTTGTTAATGCTCTTTG |
| | | TCTGTTGTGCCTTTTCAGGGAAGTGCCCAAGCTTGGGAGGACATGGAGAACAATAGGCATATTG |
| | | GAGAGTGAGTGGGGTTTGGAGTCAGAGCCCCTTAGACTTGAATCCTACTCTGCCAGCTGTGCAG |
| | | TCCCAGACAAATCCCCTTACCTTTCTGAGCCTAGTTTCTTATATTTAAAATGATGTTAGTGCTC |
| | | ACTTTATAAGATTGTTGTAAAGATTAGAGATAATGACTATTAAGCTCCTAGTAGTGCCTAGAGA |
| | | AACAGTGAATGCTCAATAAATGTAATTGCTGTTAATAAAACAATATTTACCTATTAAAACATCA |
| | | TTAATCCCTATTCGATGAAATGTCATTTGACACTGGGGAGTAATCTAACAAACTACATGAAGAT |
| | | AGTGATAATTATGTTGCTAACTGTACTCAGGAAAAGGGACTCAAGCTTCACATTTTTGGCTGTT |
| | | TATGAAGGCAAATGTCTTCCCATGGAGAGATGCAAAAAGACATTCTTACCAGACCAATGGTGGC |
| | | TGCTCCAATCCCAATGAGAGGGCTGACAGAAATAATAACCAAGGTCAGTTTCCAACCCCTGAAA |
| | | AATCCCAACAGGAAACCACAGATGGTCGAGGTCATGCGCTGAATGAAAAGGGCCATTTGGTCAG |
| | | CTATGGCATCATTGATTTTATTAATATCACTAGAAACCAGAAAGATTTTGGTCACTAAAACTGA |
| | | ATTTGATCATTCAAATATCTTGCTGAAAGTCTCAGTCTTTCCCTTTTAAACATTCCCATCTCTC |
| | | TATCCCTATCACCCTTGGATAGCATTAACAGCCTCTCAGATCTTGGAAAATTTGCTGCACCTTG |
| | | GGATGTTATCAAGCCTCTTTCCTGATAGCCAATCAATTTTGTTCTTAATCTAGGTTTCCCAGCT |
| | | GGTACTCAGTGTTGATAAAGGCTTTTGGAAACCATCTTATTTGTCTTTTTCTTTTACATAGCTA |
| | | ATATCCTTGCTCTGTCTTGCAAAGCTTTTCTTTCTTCATGCCTGCTGAATCCTTTCAGCCTCAA |
| | | GGTTCTAGTCACATACCTTCTCGTGCATCAATCTTGTATAATCCCCCAAGAAGAAGTAACACCT |
| | | TTCTCCCTGTGTTTCCGTAACACTGTAATTAATCCTTGTGCATTTGTATGTGTGTGGAATTATT |
| | | GCATTCTGCATATAGGCAGTATAGAGTAGTGGTGAAGAGTGCAGATTCTGGAGCCAGACTAGGA |
| | | ATTTGAATACAGACTCTTGTTGGGCAAGTTACTTAACCTTTTTGTGGCTCAATTTTCTTGTCTG |
| | | TAAAATAAGAACAATAATAGAACCTACCCCAATGGGTAATAATGAGGATTAAAGTAGCGAATAT |
| | | ATGTAAAGCCTATAGGACAGCGCCTATCATATAATAAACAATATGTGTTAGTTCTGATTATTTG |
| | | CTTGCATTTCTTATTTCCCCTACGAGGCTGTAAGTTCCTCAAGAGCACAAGTGCAAGGCAATTG |
| | | CTCCAGAATATTTATTGAATATAATTATATTAAATTCATATTCCTGAGAACATTTCCTTAATCT |
| | | CTTGTCCAGTTGGAGTGAAGAGAGCTTGGAACTAAACAGCAAGAAAGAACCTAAGACATCACCC |
| | | AGGTATTAGGCCATTGTGTTCCAGCAGGGTTAGATAACTGCTCAAGGTCACAGTAAGGAGCAGA |
| | | GTAAGTGCCGGAAGTCAGGGGTCCTGAATTTCAGTGTGCTTTATCTACACTGTAGAGTGACTGT |
| | | CTTTCAGGGGACCTCAAAATTCA |
| 11 | RR54 v1 | AGAGAGAGAGAGAATAAAAGAAAATATGTCTTAGGACTGGATGTTCGATGCCTTGCCTCATATA |
| | (−) strand | ATTACAGTGTAGAATGCAACCAATCTGTATTAGACCACATCTTCACCCATTGGCTGACTCAGGA |
| | paRNA | ACAGTCCTGGAAACGGCTTGTAGTAGTCCTGTTAGTCTCTGAAACCCTAGCAATGAGGTAGGAA |
| | Mouse | TCCGATTCTCAACGACAAACAGGTTTGGCAGGTGCTTGAGACTATGAGAAGGTTTTTTTTGTTG |
| | | TTTGGTTTGTTAGTTGTTTTGTTTTGTTTTGTTATCAACTGAAGCAGTCACAATGTTGCTGAGT |
| | | CCTACTTTTTCAGCTCATATCTTATAATGTCCAATTAGCACCTAAACTATTTTAATCCATTGCC |
| | | AAAAACTATAATCAGAATTTCTTAATAATTTACAGTAATAAAAATTTTAAATTAATAACACATA |
| | | ATTCAGAGCTGAAAACAAAATTTAATGTTATTCGCTTTTCCTCTGAAATTCCATGTAATGAATT |
| | | ATTTTTATCTCTCCCAAATCTCTGAGGAAAGGACTGAGAATTTTCAAGCCTTTCAGAAAAATCA |
| | | ATTTTCTGTAACATCGGAGAATCTAGCAGTTTAAAGCAGGAAATTAAGATTTCTACATAATGGT |
| | | TATCTGACTTGGCTGTGTAAGTAGGAACACCTCAAGAACTCTTATTTGACCACAAAACCCCCAG |
| | | TGTCCCTCTCTGTTCCATGACATGTGATATTTAACCTGCCTACTATATATATGTGCTTCTGTTC |
| | | AACTAGGGTGAAGTTTCCTTTTGATAAAAGATGGAATCTTATCAATTCAGAGCCGAACACTGGA |
| | | GGTCAGTCCCATGACCATAACTGGTAGCCTCAGCAGTGACTTTTCTATCTTAGAACATTTGCAT |
| | | CAGCTCCTGGAAGAGCACAGTCGAGCAGAAGGGTGGAGCCCAGCGTCTGCATGGATTGTCCTTG |
| | | AGAACCTAAGGGATGAGAGCATCCAGCGATGGGGACGAATGAGGGGCCTCCGAGATACTCCAGA |
| | | TGAAAGGGGACAAACACAGGCTCCTGTGAGCCACGCAGGTACAGGACAAAAAGTCAAGGTCCTC |
| | | CAGTTTCTTGTGTGCATCTCATGGTGGCCAAGGTGCTTTGTGACTTGGTGGAAATACCAGGCTA |
| | | GAGCAGCACATGAATGGGCTGAACTTCTCTAAGGGCCTGGTCCACACTAACAGCTGAGTCTGGT |
| | | ATTGCAAATAAGAAGGAAGGGAGGGAGGGAGGAAGGGAGGGAGAGAGGGAGGAAGGAAGGGGGA |
| | | GAGGGAGGAAGGAAGAAGAAATGGATTCTCAGAAGCTGGTCTCAGAATGAAGAATCCTACAATC |
| | | CTACTGCAGTAAGAGCAAGGACCCCGCCGTTCCCCCTCCCTCTCTGAATCATGATTTTATTGAA |
| | | ATATAGTTATTACACTCATCATTTTGTTGTCTTTGGTTGCGTCATCGAGGATCTCTGACACAAA |
| | | GTGAATGTTCCTGCTGCATTCACTCTCGGGCTCTTTACGGAAGAGCCTTCTGCACTGGGTGTCC |
| | | TCTTCCCATCCCAGCCACACAAAGTCAGTTCAGAACAGTGGGGGAGTTCTCAAGGAGGTTACTT |
| | | CCCGACTAAAATATTTAGTGTGCCAAACCTTGTAACCTGATTTACCCTAGTGGAGCTTCCGGAG |
| | | GGGACAGAAGACAGGTGACAGAATTCATGGAAAACTACAGACCTTGGCTGAGGGAGAAGCATGG |
| | | GCACTAGCCTGGGAAGGCTCTGGAATGTGCATATTCACCTTGGATTTGGGAGGAAAACCCAAAG |
| | | TAGACAAGGGAAGGTGGAGAGGAGGGAAGAACACATAGAAGGCCCAGACCCCAGAGACAGAATA |
| | | GGAGCAAGGGACGAAGGATGGACTCCCCACTAGGTCTGGGGAGTACAGGGCCATCTCTGGAGCA |
| | | GCTGTCGATCCCTTGGTTCCTTGTGATCTTTAACCCTGGGGATTGGGGCTTTATCCTGAGAACA |
| | | ACGGAAGCTAGTGAGGGGTTAACACTTTAACATCTCCGATAAGTCTTGGGATTTTGTGATTATT |
| | | AGTTCAAATCATGCTTCTATAATGCCAAGTTTAAAGGACATCTCTCTGGGGTTTTTATTTTGGG |
| | | TGATCTCTTTTTTCAATCCATTCACCTAATTTTGCCACACACACACACACATTTTTGAGACAAC |
| | | TGAAGTACAAAATAGCACTGCTGTAAGACCGTTACCAGGCCTCCCTCACTGTATATAATACTAA |
| | | GAAGTCAGCCATTTGTCTTCACACGTCTACCCAAGCACTGTAGCTTTACTGGATGACAAGGTTG |
| | | GGCTTTTGGTAAATCTGAACCACAACCCTCCCCCATAAACTGAGACTACCAAATAAAACAGACT |
| | | CGGAAAGCAAAGACTTAAAAAACGCCATAGGCAAATGAGAGTCACTTACCTACAGATGTGAATT |
| | | TGAGGGAGCCAGGAGAAGCGAGAGACGCCACTGTGGAAAGTCAGGGTTGTACACCCCTTTCCAA |
| | | GTTCAGTTTTCATGGTAATAAAGCATTGAACAGAAATCAGGCTTTTTTAAGAACACTATCTATT |
| | | TGCTTATAGGTCAATGGCCTAAAGTCCAGATCTAGCACAGTTCAGTGACATGAGAGGAAAGGTC |
| | | GAACATACTCAAAGCAGGAACCCAAACCCAGAGTGCGTGGGGACCTTCTGAGGGTATCAACAAG |
| | | CTTTAGAAAATGCCCAGTTGCCCGAGAGTGGGGCCTCATGGTAGAGAGCCTGGTGAGAGGCCCG |
| | | ACTCTTCTTTTTTAAGCCCTAGGTTTTAAAAAGTAACTTTAAAAAAATCTAACAGGACCAAACT |
| | | ACTTCTTATCGTCTCTGCTCTATTTGAAGTGACCCTTGTGACATCCTGGGTTGCAGGCCCTCAG |
| | | TGATCTGGAGCCAGCCCCAAAGTTTCATGGAGAATTGATAACATGCAATTGCCTTCTGCTCAGA |
| | | ACTCTGTGCACACAGATGACCCTTGAACTCTGGTCTGAGCAGTCAATAGCCTCAAGCTCTGCCC |
| | | ACTAGCTGCAGCGCTGTATAAGTAGAAATGCATTACTTTAAAAAACACATTCCCATTAACAAAA |
| | | CCTCAAAGCAAATAAGCTTAGAACTGGCTGTGACTTTTCGTATGCCTTCTTACTATTAATCTCC |
| | | ACATATTTCTTTAAAAAAACAAGTTTTACCATTTTTCTTCTTCATTAATTTCAATTGCATTGTA |
| | | TTATAAAAAGTAATATGGCCATATGATTCAAAATGCTATTTAGTTTTTATATTTCTTCCTGGAA |
| | | AGGGGATGTAAGATTGTTACTGGACATGGGGTCCCAACTTGTGCTCCAAGTCAGAACCGATCAG |
| | | CTGCCTTCTATAGGCCAATAAAATAGCCAAGTTAGTAATAGAAAGCAGAGAAAGGAGATTTATT |
| | | CAGTGTTCCACATTGGGAAAAAAATACAGAGATCCAGTGTATATCCAGTTTTGGGCTCCTGAAA |
| | | TGAGACCAGAATTTAATTAGAACACCAAATGCACATCTTAGCAGT |
| 12 | RR75 v1 | AATCCTGTCCTTACAACCACTGGAGGAAACAAAAAACTCAAAGCTAAGCAGCTCTCTCTCTCTC |
| | (−) strand | TCTCTCTCTCTCTCTCTCTCCCTCCCTCCCTCCCCCCCTCTCTCAGTTCTCTCTCTCTCTGCCT |
| | eRNA | CATCTTTTCCACTTCCCATGTAACCTCCTCTCTAAACAAACAGTTTTCCCTGGTGATAAGGAAC |
| | Mouse | AGAGAGGGACTTTTTAGTCATTCAGGATGCACCCTCTATACTGTCATTGAGCACCCCTCAGGGC |
| | | TGACGGTCATCTCCAAGACTGGTGTCCCAAAGGACATGTAACCCTGACCTTGAGTATCATTGAT |
| | | TTGTGAGGCCCACCTTTACTATTGTCTGTAAATGTTAGTCTTTCTTTTAGTCTCTGCATTCTGT |
| | | ATTCTTCTAGGTCACTGGACTAGGCCAGCTGCAAACCAACATGGATCTTTGACCCCTAGTAGAA |
| | | CAACAATCCCAGGTCAGGGCTTTCAGGGCCATGACCTGCATGACCTGCATAGAGAAAGGGACAG |
| | | CCAGTCAGCTCACCTGAGAAGTAAATGAATAACCACAGCTAGCACAACTGCCCCAACCACTCTT |
| | | CCATGAACTGTGGTCACATCTCTGCAGTTCCCGGGTGCCAGGTGACTTATCAGTAGGCCTTTGA |
| | | CCTCGGTTGCTTTAGTTGTTTATCAGCTGTGTGTTTCAATTTATCTCACACCAACCTGTTTGCT |
| | | AAAGAGTGCCCATTCCTTGGCTCCAAGCACTAAAGCTGTTTTGGGGAGTACATCCCTCAGAAAA |
| | | CTCAGAGTACTTTATGCATCCTCTCTGAGCCTTGCCCAGTGGCAGCTCAGGGCTAGGATGTTTT |
| | | CATTAGAGAGCACCTATCGAAACAACATGGCTTAATATGTTGCACCTTCCCTGCTGAAAGGGCT |
| | | GCTCTGTCTATTTCTTGGATGTAAGCAAAGGCTTTCCAATTACAGCCCTTTTGATATTTTGAAT |
| | | TCCATAATTAATAAGGTGAAGTCTGGCTAGTGTATGGCATGCTCAGCAGGATCCTTGACTTCTA |
| | | CACATGACATGTCAGTAACACTTCTGATAACGATGTCACCAGACAGTGCTAAGTGTCCCTTAGG |
| | | GGACAAAATTGCTCCTCCTTGAGAACTGCTGTCATAGAGATTCCTTTCTTGAGGGTCCAGAATG |
| | | TCACTGTACCCAGGACCACTTGTTTGGAAACTCAGTCATTACTGTTGTAGTGATGTTTCCTTGA |
| | | TGGGCGGTTATATTCGTTAATGACACTAACAGAGAGGTTTTGCTGCTTAAAAAACTGCTCATAT |
| | | CCTGTTTTGGCAAGCACTAACTTTTGTAATGTAAAAAATATCTACTTTTCTTATTATGAGGATA |
| | | GAAGGTATCCAACAAACCGAGTTATATATAATGACATTTATGGATTTAGAAATGACCACATTGG |
| | | CAAGCACAGCATTGAGTGCTACTAAGGCCTGGATCCTGGCTGAGCTGGGGCTATGACAGCTCGC |
| | | ACTTGGTAGAAAATCGAGCCTCTAGGATTCTGCAAATGCTCCCAGGAACCCCATAGTCCTCAGA |
| | | TTTCCGGTTCATAAAGTCAGGTGCCAATGTGAACAGCAGCTGTGGTTGACTGGATGCCACAGCC |
| | | TTTTGAACTGTGGCTATAGGGTCAGGTAGCTGAATGTGGGATTAAAAAAAAAGCAACAGTGAGA |
| | | GGTTATTGAATGAACAATAATTAAAAATTATTTCAAAACCAAAGATAATGGATCCAAGGTTTGG |
| | | GTAGGACTTGTCCTTCTTGTGTTGAATGGTTTCCCCGTTAGCCAAGGTTCTGAGCACACAGCAC |
| | | ACACACTTTGCCTAGACCACCTTGGCTCATAGTGGTGACTCTTGTATGTGAAGATCTTGTATGT |
| | | GAAATATTTTCAGCATATGTAGGATAGGAATTTTTTTTTCTTTTTAGAATGTAATAAATTACGG |
| | | GAAGGAAGGGCTTAATATTTTCTTAGTTATTCTTCCTCATGGAAGTACCACACTGGGATGTCTT |
| | | TGGATTGGATTGTGATG |
| 13 | RR76 v1 | GTTAGTGCTTGCCAAAACAGGATATGAGCAGTTTTTTAAGCAGCAAAACCTCTCTGTTAGTGTC |
| | (+) strand | ATTAACGAATATAACCGCCCATCAAGGAAACATCACTACAACAGTAATGACTGAGTTTCCAAAC |
| | eRNA | AAGTGGTCCTGGGTACAGTGACATTCTGGACCCTCAAGAAAGGAATCTCTATGACAGCAGTTCT |
| | Mouse | CAAGGAGGAGCAATTTTGTCCCCTAAGGGACACTTAGCACTGTCTGGTGACATCGTTATCAGAA |
| | | GTGTTACTGACATGTCATGTGTAGAAGTCAAGGATCCTGCTGAGCATGCCATACACTAGCCAGA |
| | | CTTCACCTTATTAATTATGGAATTCAAAATATCAAAAGGGCTGTAATTGGAAAGCCTTTGCTTA |
| | | CATCCAAGAAATAGACAGAGCAGCCCTTTCAGCAGGGAAGGTGCAACATATTAAGCCATGTTGT |
| | | TTCGATAGGTGCTCTCTAATGAAAACATCCTAGCCCTGAGCTGCCACTGGGCAAGGCTCAGAGA |
| | | GGATGCATAAAGTACTCTGAGTTTTCTGAGGGATGTACTCCCCAAAACAGCTTTAGTGCTTGGA |
| | | GCCAAGGAATGGGCACTCTTTAGCAAACAGGTTGGTGTGAGATAAATTGAAACACACAGCTGAT |
| | | AAACAACTAAAGCAACCGAGGTCAAAGGCCTACTGATAAGTCACCTGGCACCCGGGAACTGCAG |
| | | AGATGTGACCACAGTTCATGGAAGAGTGGTTGGGGCAGTTGTGCTAGCTGTGGTTATTCATTTA |
| | | CTTCTCAGGTGAGCTGACTGGCTGTCCCTTTCTCTATGCAGGTCATGCAGGTCATGGCCCTGAA |
| | | AGCCCTGACCTGGGATTGTTGTTCTACTAGGGGTCAAAGATCCATGTTGGTTTGCAGCTGGCCT |
| | | AGTCCAGTGACCTAGAAGAATACAGAATGCAGAGACTAAAAGAAAGACTAACATTTACAGACAA |
| | | TAGTAAAGGTGGGCCTCACAAATCAATGATACTCAAGGTCAGGGTTACATGTCCTTTGGGACAC |
| | | CAGTCTTGGAGATGACCGTCAGCCCTGAGGGGTGCTCAATGACAGTATAGAGGGTGCATCCTGA |
| | | ATGACTAAAAAGTCCCTCTCTGTTCCTTATCACCAGGGAAAACTGTTTGTTTAGAGAGGAGGTT |
| | | ACATGGGAAGTGGAAAAGATGAGGCAGAGAGAGAGAGAACTGAGAGAGGGGGGGAGGGAGGGAG |
| | | GGAGAGAGAGAGAGAGAGAGAGAGAGAGAGAGAGCTGCTTAGCTTTGAGTTTTTTGTTTCCTCC |
| | | AGTGGTTGTAAGGACAGGATTTTCTAGAGGGCAGAAGACAGGCAGCCCAGGTCACTACAAAACT |
| | | CTGTCATTATGTTTTGTCTGTAGAGCCCAAAGCCGTTCCAATAAAGTCCTTGGGGTGGGAGGTT |
| | | TCATTTTTCTTTCCCCAATTTTTACTTTGTATTTTTTTGAGATACAGTCATTCACATAGGGGGT |
| | | CCTGACTCCAGGACCCTCTCACACGTGGTGACTCTACAGCCCTCTTACGCACGGGCTTCCGAAC |
| | | CTGCGGATTGCTAATGTATAAAATGGCACAGTTCAAGCATATGACCTGTGTGGCACCTTTGGGC |
| | | GTACATTAAATTGCTTCTAGATCATTTGTAATGCCTAGTATGAATGCTGTATACATAGTAACAC |
| | | TGTTGTTCAGGAGAGAAGAACAATGAAAAGGTCTGTGTGTGGTCAGTGGAGATTCAGTTTACAA |
| | | AACTACTCAAACCTGCAGTCGGTTGAATCTGTGGGCATGATTTCACACTTAAAAAAAGTCAAAA |
| | | GAATGGTATGATCTAGAGGCTCTAAACATTAGCATCTTACCACATTTTACTCTCATTCTTTTTT |
| | | ATATATACATATGAGTTTTTGTTTATATATACATATATTATTTTCTAAACTTGCATTTTGTTGT |
| | | GTATTGAATTTTTGATCATTTGTTACCGTTTGGTTTGTTTTTGAGACAGAATCTTACTATGTAG |
| | | CCTTGGCTGGCCTGGAA |

[0087] The present disclosure describes ASOs that may be used to increase the expression of the target gene ABCB11 (e.g., human ABCB11 or murine Abcb11). Without wishing to be bound by theory, this increased gene expression may be due to increasing the amount or stability of the targeted ABCB11 regRNA, or interference with regRNA-associated repressors that inhibit the expression of the gene to thereby increase ABCB11 gene expression. These ASOs are different from the ASOs previously described that were designed to inhibit eRNAs (see, e.g., PCT Application Publication No. WO2013/177248 and PCT Application Publication No. WO2017/075406). Without wishing to be bound by theory, it is hypothesized that the ASOs' ability to upregulate ABCB11 regRNAs is attributable to the selection of a target sequence in the regRNA and/or the chemical modifications of the ASOs.

[0088] Increased ABCB11 gene expression can be at least about 0.1%, 0.5%, 1%, 2%, 3%, 4%, 5%, 6%, 7%, 8%, 9%, 10%, 15%, 20%, 25%, 30%, 35%, 40%, 45%, 50%, 55%, 60%, 65%, 70%, 75%, 80%, 85%, 90%, 95%, 100%, 105%, 110%, 115%, 120%, 125%, 130%, 135%, 140%, 145%, 150%, 155%, 160%, 165%, 170%, 175%, 180%, 185%, 190%, 195%, 200%, 205%, 210%, 215%, 220%, 225%, 230%, 235%, 240%, 245%, 250%, 255%, 260%, 265%, 270%, 275%, 280%, 285%, 290%, 295%, 300%, 350%, 400%, 450%, 500%, 550%, 600%, 650%, 700%, 750%, 800%, 850%, 900%, 950%, or 1000% or more increase in expression as compared to baseline gene expression, gene expression prior to treatment, or gene expression after treatment with a control ASO. Increased ABCB11 gene expression can be at least about 0.1-fold, 0.5-fold, 1-fold, 1.5-fold, 2-fold, 2.5-fold, 3-fold, 3.5-fold, 4-fold, 4.5-fold, 5-fold, 5.5-fold, 6-fold, 6.5-fold, 7-fold, 7.5-fold, 8-fold, 8.5-fold, 9-fold, 9.5-fold, 10-fold or more increase in expression as compared to baseline gene expression, gene expression prior to treatment, or gene expression after treatment with a control ASO.

[0089] ASOs that hybridize to (e.g., is complementary to) a portion of any of the regulatory RNAs provided herein (e.g., as described in Table 1 above) are contemplated by the present disclosure. In some embodiments, the regulatory RNA has a nucleotide sequence of any one of SEQ ID NOs: 1, 2, 3, 4, 5, 6, 7, 8, 9, 10, 11, 12, or 13.

### Sequences of ASOs

[0090] In certain embodiments, the ASO disclosed herein is complementary to a sequence in the ABCB11 regRNA that is no more than 300, 250, 200, 150, 100, 50, 40, 30, 20, or 10 nucleotides from the 5′ or 3′ end of the ABCB11 regRNA. In certain embodiments, the ASO disclosed herein is complementary to a sequence in the ABCB11 regRNA that is no more than 300, 250, 200, 150, 100, 50, 40, 30, 20, or 10 nucleotides from the 5′ end of the ABCB11 regRNA (i.e., the 5′ most nucleotide of the ABCB11 regRNA sequence forming a duplex with the ASO is no more than 300, 250, 200, 150, 100, 50, 40, 30, 20, or 10 nucleotides from the 5′ end of the ABCB11 regRNA). In certain embodiments, the ASO disclosed herein is complementary to a sequence in the ABCB11 regRNA that is no more than 300, 250, 200, 150, 100, 50, 40, 30, 20, or 10 nucleotides from the 3′ end of the target regRNA (i.e., the 3′ most nucleotide of the regRNA sequence forming a duplex with the ASO is no more than 300, 250, 200, 150, 100, 50, 40, 30, 20, or 10 nucleotides from the 3′ end of the ABCB11 regRNA).

[0091] In certain embodiments, the ASO is no more than 8, 10, 15, 20, 25, 30, 40, 50, 60, 70, 80, 90, or 100 nucleotides in length. In certain embodiments, the ASO is at least 8, 9, 10, 11, 12, 13, 14, 15, 16, 17, 18, 19, 20, 21, 22, 23, 24, 25, 26, 27, 28, 29, 30, 31, 32, 33, 34, 35, 36, 37, 38, 39, 40, 50, 60, 70, 80, 90, or 100 nucleotides in length. In certain embodiments, the ASO is at least 8, 9, 10, 11, 12, 13, 14, 15, 16, 17, 18, 19, or 20 nucleotides in length. In certain embodiments, the ASO is 8, 9, 10, 11, 12, 13, 14, 15, 16, 17, 18, 19, 20, 21, 22, 23, 24, 25, 26, 27, 28, 29, 30, 31, 32, 33, 34, 35, 36, 37, 38, 39, or 40 nucleotides in length.

[0092] In certain embodiments, the ASO is designed to lack a stable secondary structure formed within itself or between each other, thereby increasing the amount of the ASO in a single-stranded form ready to hybridize with the ABCB11 regRNA. Methods to predict secondary structures are known in the art (see, e.g., Seetin and Mathews, Methods Mol. Biol. (2012) 905:99-122; Zhao et al., PLOS Comput. Biol. (2021) 17 (8): e1009291) and web-based programs (e.g., RNAfold) are available to public users. For example, ASOs have been designed to target a human ABCB11 regulatory RNA (e.g., an eRNA or a paRNA). The nucleotide sequences of some of these ASOs are provided in Tables 2-11 below. In some embodiments, an ASO of the disclosure comprises or consists of a nucleotide sequence provided in any one of Tables 2-11. In some embodiments, an ASO of the disclosure comprises or consists of a nucleotide sequence and/or a chemistry modification as provided in Table 2. In some embodiments, an ASO of the disclosure comprises or consists of a nucleotide sequence and/or a chemistry modification of any one of SEQ ID NOs: 14-6021.

TABLE 2
Exemplary ABCB11 ASO sequences and/or chemical modifications

| SEQ | | Sequence | SEQ | |
|---|---|---|---|---|
| ID | | MOE (M); DNA (d); LNA (L); 2′ OMethyl (m); | ID | |
| NO | Name | PS (=); PO(-); 5-MethylCytosine (5C); Teg-GalNAc [TEG] | NO | Sequence |
| 14 | CO- | MT=M5C=MT=MG=MG=MA=MA=MA=MA=MT=MA=MA=MT=MG=M5C=M5C=MT= | 5520 | TCTGGAAAAT |
| | 3974 | MT=MT=M5C | | AATGCCTTTC |
| 15 | CO- | MT=M5C=MA=MA=M5C=M5C=MG=MA=M5C=MA=MG=MT=MG=MA=MG=M5C=MT | 5521 | TCAACCGACA |
| | 3975 | =MT=MA=MT | | GTGAGCTTAT |
| 16 | CO- | MA=MT=MT=MT=MT=MA=MG=MT=M5C=MT=MA=MT=MT=M5C=M5C=M5C=MA= | 5522 | ATTTTAGTCT |
| | 3976 | MG=MA=M5C | | ATTCCCAGAC |
| 17 | CO- | M5C=M5C=MT=MT=M5C=M5C=M5C=MT=MA=MT=M5C=MA=MG=M5C=M5C=MA= | 5523 | CCTTCCCTAT |
| | 3977 | MT=MA=MG=M5C | | CAGCCATAGC |
| 18 | CO- | MT=M5C=MA=M5C=M5C=MG=MT=MG=MT=MA=MT=MT=MT=MA=MT=MT=MT=M | 5524 | TCACCGTGTA |
| | 3978 | 5C=M5C=M5C | | TTTATTTCCC |
| 19 | CO- | M5C=MT=MT=MA=M5C=MG=MT=MG=MG=M5C=M5C=MA-MA=MT=MG=MG=MG= | 5525 | CTTACGTGGC |
| | 3979 | MA=MT=M5C | | CAATGGGATC |
| 20 | CO- | MG=MG=MT=MG=M5C=M5C=MT=M5C=MT=MG=MA-MA=MG-MA=MA=MA=MG= | 5526 | GGTGCCTCTG |
| | 3980 | MG=MA=M5C | | AAGAAAGGAC |
| 21 | CO- | MT=MT=MA=MG=MT=M5C=M5C=MT=M5C=MT=MA=M5C=M5C=MT=M5C=MA=MA | 5527 | TTAGTCCTCT |
| | 3981 | =M5C=MG=MG | | ACCTCAACGG |
| 22 | CO- | M5C=MA=MT=MT=M5C=MT=MG=MT=MT=MT=MT=M5C=MT=MT=M5C=M5C=MT= | 5528 | CATTCTGTTT |
| | 3982 | MA=MA=MG | | TCTTCCTAAG |
| 23 | CO- | MG=MT=MG=MG=M5C=MA=MG=MT=MT=MA=MA=M5C=MT=MT=MT=MG=MG=M | 5529 | GTGGCAGTTA |
| | 3983 | T=MG=MT | | ACTTTGGTGT |
| 24 | CO- | M5C=MA=MT=MT=MT=MA=MG=MA=MG=MA=M5C=MA=MA=MA=MG=MA=MA=M | 5530 | CATTTAGAGA |
| | 3984 | T=M5C=MG | | CAAAGAATCG |
| 25 | CO- | MA=MA=MG=MA=MG=MG=MA=MA=MA=MG=MA=MA=M5C=MT=MG=MT=MA=M | 5531 | AAGAGGAAAG |
| | 3985 | 5C=MA=MT | | AACTGTACAT |
| 26 | CO- | MT=MG=MT=MT=MT=MT=MG=M5C=MT=MT=MG=MG=MT=M5C=MA=MA=MG=M | 5532 | TGTTTTGCTT |
| | 3986 | A=MG=MG | | GGTCAAGAGG |
| 27 | CO- | MA=MT=M5C=MA=MA=MA=MT=MA=M5C=MT=MG=MG=MA=MG=MT=MT=MG=M | 5533 | ATCAAATACT |
| | 3987 | T=MG=MT | | GGAGTTGTGT |
| 28 | CO- | MA=MA=MA=MT=MG=M5C=M5C=M5C=MA=MA=MG=MT=MT=MT=M5C=MA=MT= | 5534 | AAATGCCCAA |
| | 3988 | MT=MG=M5C | | GTTTCATTGC |
| 29 | CO- | MA=MA=MG=MA=MT=MG=M5C=MT=MA=M5C=MA=MA=MT=MT=MG=M5C=M5C= | 5535 | AAGATGCTAC |
| | 3989 | MA=MT=MA | | AATTGCCATA |
| 30 | CO- | MG=MG=MA=MT=MT=MA=MA=MG=MA=MA=MG=M5C=MT=MA=MT=MT=MT=MA | 5536 | GGATTAAGAA |
| | 3990 | =MG=MG | | GCTATTTAGG |
| 31 | CO- | MG=MG=MG=MA=MT=MG=MA=M5C-MT=M5C=M5C-MT=MA=MA=MA=MA=MA= | 5537 | GGGATGACTC |
| | 3991 | MT=MG=MG | | CTAAAAATGG |
| 32 | CO- | MT=MG=MT=MT=MT=M5C=M5C=MT=MA=MG=MT=MA=M5C=M5C=MA=MA=MG= | 5538 | TGTTTCCTAG |
| | 3992 | MA=MA=MT | | TACCAAGAAT |
| 33 | CO- | MG=M5C=M5C=M5C=M5C=MT=MT=MG=MA=MA=MT=MA=MA=MT=MT=MT=MT= | 5539 | GCCCCTTGAA |
| | 3993 | MT=MG=MT | | TAATTTTTGT |
| 34 | CO- | M5C=M5C=M5C=MA=M5C=MT=M5C=MT=MA=MG=MA=MT=MT=MG=M5C=MA=M | 5540 | CCCACTCTAG |
| | 3994 | A=MG=M5C=M5C | | ATTGCAAGCC |
| 35 | CO- | MG=MT=M5C=MT=MA=MG=MG=MA=MG=M5C=MT=MT=M5C=MT=MG=MT=MT=M | 5541 | GTCTAGGAGC |
| | 3995 | T=MA=M5C | | TTCTGTTTAC |
| 36 | CO- | MT=MT=MG=MT=M5C=MT=M5C=MT=MG=MG=MT=MT=MG=MA-MA=MG=M5C=M | 5542 | TTGTCTCTGG |
| | 3996 | 5C=MT=M5C | | TTGAAGCCTC |
| 37 | CO- | MG=M5C=MT=MG=MT=MG=M5C=MT=M5C=MT=MG=MT=MA=MA=M5C=MA=M5C | 5543 | GCTGTGCTCT |
| | 3997 | =MT=MG=MT | | GTAACACTGT |
| 38 | CO- | MA=M5C=M5C=M5C=M5C=M5C=M5C=MT=M5C=MA=M5C=M5C=MT=MT=MG=MG- | 5544 | ACCCCCCTCA |
| | 3998 | MT=MT=M5C=M5C | | CCTTGGTTCC |
| 39 | CO- | MG=MG=M5C=MA=MA=M5C=M5C=MT=M5C=MG=MT=M5C=M5C=M5C=M5C=MT= | 5545 | GGCAACCTCG |
| | 3999 | M5C=MA=M5C=MT | | TCCCCTCACT |
| 40 | CO- | MA=MA=M5C=MT=MT=MA=MT=MT=MT=MA=MT=MG=MA=MG=M5C=MT=MG=M | 5546 | GGATTAAGAA |
| | 4000 | T=MT=MG | | GCTATTTAGG |
| 41 | CO- | MT=MA=MT=MT=MA=MG=MG=MA=MG=MT=MT=MA=MG=MT=MA=MG=MT=MG= | 5547 | AACTTATTTA |
| | 4001 | MG=MT | | TGAGCTGTTG |
| 42 | CO- | MG=MA=MG=MA=M5C=MA=MA=MA=MT=MT=MA=MT=MA=MG=MT=MG=MG=MT | 5548 | TATTAGGAGT |
| | 4002 | =MT=MA | | TAGTAGTGGT |
| 43 | CO- | MG=MG=MG=MA=MA=MT=MA=MG=M5C=MT=MT=MT=MT=MT=MA=MG=MA=MG | 5549 | GAGACAAATT |
| | 4003 | =MA=MT | | ATAGTGGTTA |
| 44 | CO- | MA=MT=MT=MT=MG=MT=M5C=MA=MA=M5C=MA=MT=MT=MT=MT=MG=MA=M | 5550 | GGGAATAGCT |
| | 4004 | G=MG=MG | | TTTTAGAGAT |
| 45 | CO- | MT=M5C=MA=M5C=MA=M5C=MT=MT=M5C=MA=MG=MA=M5C=MT=MG=MG=MG | 5551 | ATTTGTCAAC |
| | 4005 | =MA=MA=MT | | ATTTTGAGGG |
| 46 | CO- | MA=MT=MA=MT=MT=MG=M5C=MT=MA=MA=MT=MG=MG=M5C=MT=MT=MG=M | 5552 | TCACACTTCA |
| | 4006 | A=MG=M5C | | GACTGGGAAT |
| 47 | CO- | MG=MT=MT=MT=MT=MT=MA=MG=MG=MT=M5C=MA=M5C=M5C=M5C=MA=MA= | 5553 | ATATTGCTAA |
| | 4007 | MG=M5C=M5C | | TGGCTTGAGC |
| 48 | CO- | MT=MT=M5C=MT=MA=MG=MG=MA=MT=M5C=MT=MA=MA=MT=MT=MT=M5C=M | 5554 | GTTTTTAGGT |
| | 4008 | A=MG=MT | | CACCCAAGCC |
| 49 | CO- | MG=MT=MG=MG=MA=MT=MG=M5C=MA=MT=MG=MT=MT=MT=MA=MG=MA=MG | 5555 | TTCTAGGATC |
| | 4009 | =MG=MG | | TAATTTCAGT |
| 50 | CO- | M5C=MA=MT=MT=MG=MT=M5C=M5C=M5C=MG=MG-MT=MT=MT=MT=M5C=MA= | 5556 | GTGGATGCAT |
| | 4010 | MA=MA=MA | | GTTTAGAGGG |
| 51 | CO- | MT=M5C=M5C=MA=MA=M5C=MA=M5C=M5C=MG=MT=MA=M5C=MT=M5C=MA=M | 5557 | TCCAACACCG |
| | 4011 | T=MT=MT=M5C | | TACTCATTTC |
| 52 | CO- | MG=MA=MA=M5C=MT=MA=M5C=MA=M5C=M5C=MG=MA=M5C=MT=MT=MT=MA | 5558 | GAACTACACC |
| | 4012 | =MT=M5C=MT | | GACTTTATCT |
| 53 | CO- | MT=MT=MG=MA=MA=MA=MG=M5C=MT=MG=MG=MT=MT=MT=MA=MA=MT=MG | 5559 | TTGAAAGCTG |
| | 4013 | =M5C=MA | | GTTTAATGCA |
| 54 | CO- | MG=MA=MT=M5C=MA=M5C=MA=MA=MA=MT=MT=M5C=MT=MA=M5C=M5C=M5 | 5560 | GATCACAAAT |
| | 4014 | C=MT=MT=MG | | TCTACCCTTG |
| 55 | CO- | MG=MT=MT=MT=MG=M5C=MT=M5C=MT=MG=MA=MT=MA=MA=MT=M5C=MA=M | 5561 | GTTTGCTCTG |
| | 4015 | 5C=MA=MG | | ATAATCACAG |
| 56 | CO- | MT=MT=MT=MT=MA=MA=M5C=MT=MT=MG=MG=M5C=MT=MT=MT=MG=MT=MG | 5562 | TTTTAACTTG |
| | 4016 | =MA=MA | | GCTTTGTGAA |
| 57 | CO- | M5C=MT=MG=M5C=MT=M5C=MA=MA=MA=MG=MT=MA=MA=MA=MA=MA=MT= | 5563 | CTGCTCAAAG |
| | 4017 | MA=M5C=M5C | | TAAAAATACC |
| 58 | CO- | MA=MT=MG=MG=M5C=M5C=MG=MA=MA=MT=MA=MG=MA=MT=MT=MG=MA=M | 5564 | ATGGCCGAAT |
| | 4018 | A=MT=MA | | AGATTGAATA |
| 59 | CO- | MA=MG=MA=MG=MT=MG=MG=MT=MG=MT=MA=M5C=MA=MT=MG=MG=MG=MT | 5565 | AGAGTGGTGT |
| | 4019 | =MG=MT | | ACATGGGTGT |
| 60 | CO- | M5C=MA=MT=MG=MT=MA=MT=M5C=MA=MA=MT=M5C=MT=M5C=MT=MT=MA= | 5566 | CATGTATCAA |
| | 4020 | MG=MA=MG | | TCTCTTAGAG |
| 61 | CO- | MG=MT=M5C=MT=MT=M5C=MT=MT=MT=MA=MT=MA=MG=M5C=MA=MA=MT=M | 5567 | GTCTTCTTTA |
| | 4021 | G=M5C=MT | | TAGCAATGCT |
| 62 | CO- | MG=MA=MT=MG=MA=M5C=MT=M5C=MT=MT=MG=MG=MT=MT=MG=M5C=MT=M | 5568 | GATGACTCTT |
| | 4022 | G=MT=M5C | | GGTTGCTGTC |
| 63 | CO- | M5C=MA=M5C=MA=MA=M5C=MA=MT=MT=MG=MT=MA=MT=MA=M5C=MA=MA= | 5569 | CACAACATTG |
| | 4023 | MT=MA=M5C | | TATACAATAC |
| 64 | CO- | MA=M5C=MT=MT=MA=M5C=MA=MG=MG=MA=MT=MG=M5C=MA=MT=MT=MA= | 5570 | ACTTACAGGA |
| | 4024 | MA=MT=MG | | TGCATTAATG |
| 65 | CO- | MA=M5C=MG=M5C=MT=MA=M5C=MA=MA=MT=MA=M5C=MT=MT=MG=MG=MA= | 5571 | ACGCTACAAT |
| | 4025 | MT=MA=MG | | ACTTGGATAG |
| 66 | CO- | M5C=MT=MT=MG=MT=M5C=M5C=MA=MG=MT=MG=MT=MA=MA=MA=M5C=MA= | 5572 | CTTGTCCAGT |
| | 4026 | MA=M5C=MG | | GTAAACAACG |
| 67 | CO- | MG=MT=MG=MG=MA=MG=MT=MG-MT=MT=MT=M5C=MT=MG=MG=MT=MT=MT | 5573 | GTGGAGTGTT |
| | 4027 | =MA=MT | | TCTGGTTTAT |
| 68 | CO- | MT=MT=MA=MA=M5C=MT=M5C=MT=MT=MA=M5C=MT=MT=MT=MG=MT=MG=M | 5574 | TTAACTCTTA |
| | 4028 | G=MA=MG | | CTTTGTGGAG |
| 69 | CO- | MA=MT=MA=M5C=MT=MT=MG=MT=M5C=MT=M5C=MT=MG=M5C-MA=MA=MA= | 5575 | ATACTTGTCT |
| | 4029 | MT=M5C=M5C | | CTGCAAATCC |
| 70 | CO- | MT=M5C=MA=M5C=MA=MG=MG-MT=MA=MA=MG=MT=MA=MA=M5C=MT=MT= | 5576 | TCACAGGTAA |
| | 4030 | MA=MT=MA | | GTAACTTATA |
| 71 | CO- | MG=MG=M5C=MT=MT=M5C=M5C=MT=M5C=MA=MA=MA=MT=MT=M5C=MA=MT | 5577 | GGCTTCCTCA |
| | 4031 | =MA=MT=MT | | AATTCATATT |
| 72 | CO- | MA=MG=MT=M5C=M5C=MA=MT=MT=MA=MT=MT=MT=M5C=M5C=MT=M5C=MT= | 5578 | AGTCCATTAT |
| | 4032 | MG=MG=M5C | | TTCCTCTGGC |
| 73 | CO- | MG=MA=MA=MA=M5C=M5C=MT=MT=MT=MT=MA=MA=M5C=MT=M5C=MT=M5C | 5579 | GAAACCTTTT |
| | 4033 | =M5C=MA=M5C | | AACTCTCCAC |
| 74 | CO- | M5C=MG=MA=MG=MG=MT=MT=MG=MG=MA=MA=MA=MA=MG=MG=MT=MT=M | 5580 | CGAGGTTGGA |
| | 4034 | G=MT=MG | | AAAGGTTGTG |
| 75 | CO- | MG=MT=MT=M5C=MA=MG=MT=MG=M5C=MT=MT=MT=MA=MG=MA=MA=MT=M | 5581 | GTTCAGTGCT |
| | 4035 | G=MA=MT | | TTAGAATGAT |
| 76 | CO- | MG=M5C=MA=MA=MA=MT=MA=MG=MA=MT=MA=MA=MT=MG=MT=MT=M5C=M | 5582 | GCAAATAGAT |
| | 4036 | T=MT=MG | | AATGTTCTTG |
| 77 | CO- | MG=MG=MG=MA=M5C=MA=MT=MT=MG=MA=MT=M5C=M5C=MT=MT=MA=MG= | 5583 | GGGACATTGA |
| | 4037 | MG=M5C=MA | | TCCTTAGGCA |
| 78 | CO- | M5C=MT=M5C=MG=MT=MA=MT=MG=MT=M5C=MA=M5C=MT=MG=MA=MA=M5C | 5584 | CTCGTATGTC |
| | 4038 | =MT=MG=MT | | ACTGAACTGT |
| 79 | CO- | MG=MG=MT=MT=MA=MT=MT=MG=M5C=MT=M5C=MT=MG=MA=MG=MT=MA=M | 5585 | GGTTATTGCT |
| | 4039 | T=MG=MT | | CTGAGTATGT |
| 80 | CO- | MG=MT=MT=MT=M5C=M5C=M5C=MA=MA=MG=M5C=MA=M5C=MA=M5C=MT=M5 | 5586 | GTTTCCCAAG |
| | 4040 | C=MT=MG=MT | | CACACTCTGT |
| 81 | CO- | MT=M5C=M5C=MA=MA=MG=MG=M5C=M5C=MT=MG=MT=MT=MG=MA=M5C=MA | 5587 | TCCAAGGCCT |
| | 4041 | =M5C=M5C=M5C | | GTTGACACCC |
| 82 | CO- | M5C=MT=M5C=MT=M5C=MG=MT=MT=M5C=M5C=MA=MA=MG=MG=MT=MG=MA | 5588 | CTCTCGTTCC |
| | 4042 | =MA=MT=M5C | | AAGGTGAATC |
| 83 | CO- | MG=M5C=M5C=M5C=MA=M5C=MT=M5C=MT=MG=M5C=MT=M5C=MA=MA=MT=M | 5589 | GCCCACTCTG |
| | 4043 | T=MT=MG=M5C | | CTCAATTTGC |
| 84 | CO- | MG=MT=MT=MG=MG=MG=MA=MT=MA=MG=M5C=M5C=MT=MG=MA=MA=MT=M | 5590 | GTTGGGATAG |
| | 4044 | T=M5C=M5C | | CCTGAATTCC |
| 85 | CO- | MA=M5C=MT=MT=MT=MT=M5C=MA=M5C=MA=MA=M5C=MT=MA=M5C=MA=MG | 5591 | ACTTTTCACA |
| | 4045 | =MG=M5C=M5C | | ACTACAGGCC |
| 86 | CO- | MG=MG=MG=MA-MA=MA=MG=MT=MT=MT=MA=MA=MA=MG-MG-MT=MA=MT | 5592 | GGGAAAGTTT |
| | 4046 | =MT=MT | | AAAGGTATTT |
| 87 | CO- | MG=M5C=MA=MA=MT=M5C=MT=MT=MT=MT=MA=MT=MA=MT=MT=MG=MA=M | 5593 | GCAATCTTTT |
| | 4047 | G=MG=MG | | ATATTGAGGG |
| 88 | CO- | MA=MG=M5C=MA=MT=M5C=MT=MG=MG=MA=MT=M5C=M5C=MT=MG=M5C=MA | 5594 | AGCATCTGGA |
| | 4048 | =MA=M5C=M5C | | TCCTGCAACC |
| 89 | CO- | MG=MT=M5C=MT=M5C=M5C=MA=M5C=MA=MA=MA=MA=M5C=MT=M5C=MT=M | 5595 | GTCTCCACAA |
| | 4049 | A=MT=MA=MG | | AACTCTATAG |
| 90 | CO- | M5C=MA=MA=MA=MT=MG=MT=MT=M5C=MT=MT=MT=MT=MA=MG=MG=MG=M | 5596 | CAAATGTTCT |
| | 4050 | T=MA=MT | | TTTAGGGTAT |
| 91 | CO- | MG=MA=M5C=MT=MT=MT=MT=MG=MA=MG=M5C=MA=MA=MG=MG=M5C=MT= | 5597 | GACTTTTGAG |
| | 4051 | MG=MT=MT | | CAAGGCTGTT |
| 92 | CO- | M5C=M5C=MA=MG=MG=MG=MT=MG=M5C=MA=MA=MG=MA=MG=MT=MT=MG= | 5598 | CCAGGGTGCA |
| | 4052 | MT=M5C=MT | | AGAGTTGTCT |
| 93 | CO- | MG=MA=MG=M5C=MT=MT=M5C=MA=MT=M5C=MT=MG=MG=MT=MG=MT=MG= | 5599 | GAGCTTCATC |
| | 4053 | MT=M5C=M5C | | TGGTGTGTCC |
| 94 | CO- | M5C=MG=MT=MT=M5C=MA=MT=M5C=MT=MT=MT=MG=M5C=MT=MT=MA=MT= | 5600 | CGTTCATCTT |
| | 4054 | MA=M5C=MA | | TGCTTATACA |
| 95 | CO- | MT=MT=MG=MA=MA=M5C=M5C=MT=MT=MT=MA=MG=MA=MA=MA=MA=MT=M | 5601 | TTGAACCTTT |
| | 4055 | 5C=MG=MT | | AGAAAATCGT |
| 96 | CO- | MG=M5C=MT=MT=MA=MT=MT=MT=MG=MA=M5C=MT=M5C=MA=MA=MG=MA= | 5602 | GCTTATTTGA |
| | 4056 | M5C=M5C=MT | | CTCAAGACCT |
| 97 | CO- | M5C=MA=MG=M5C=MA=M5C=MA=MA=MA=MT=MA=MT=MA=MT=MT=MG=MG= | 5603 | CAGCACAAAT |
| | 4057 | MA=MG=MG | | ATATTGGAGG |
| 98 | CO- | MG=MA=MT=MT=M5C=MA=M5C=MA=MA=MG=MA=MA=MG=MG=MG=MA=MG= | 5604 | GATTCACAAG |
| | 4058 | MA=MG=MG | | AAGGGAGAGG |
| 99 | CO- | MG=MT=MA=MA=MG=M5C=MT=M5C=MA=MG=MG=M5C=MA-MA=MA=MG=MG= | 5605 | GTAAGCTCAG |
| | 4059 | MA=MG=MA | | GCAAAGGAGA |
| 100 | CO- | MG=MG=MA=MG-MT=MG-MA=MG-MA=MG=MG=M5C=MA=MT=MT=MT=MA=M | 5606 | GGAGTGAGAG |
| | 4060 | G=MG=MG | | GCATTTAGGG |
| 101 | CO- | MA=MT=MT=M5C=MA=MT=MT=MG=M5C=MT=MG=MA=MA=MG=MG=M5C=MT= | 5607 | ATTCATTGCT |
| | 4061 | MG=MG=MA | | GAAGGCTGGA |
| 102 | CO- | MG=MA=M5C=M5C=MA=MA=MT=MG=MT=MT=MG=M5C=M5C=MT=MA=MT=MT= | 5608 | GACCAATGTT |
| | 4062 | MA=MT=MT | | GCCTATTATT |
| 103 | CO- | MG=M5C=MA=M5C=M5C=M5C=MA=MA=M5C=M5C=MA=MA=MG=MT=M5C=MT= | 5609 | GCACCCAACC |
| | 4063 | MT=MG=MA=M5C | | AAGTCTTGAC |
| 104 | CO- | M5C=M5C=MT=MG=MA=MG=MA=MT=MT=MG=MA=MG=M5C=MT=MA=MT=MA= | 5610 | CCTGAGATTG |
| | 4480 | M5C=MT=MG | | AGCTATACTG |
| 105 | CO- | M5C=MA=MT=M5C=MT=M5C=MT=MG=MT=MG=MA=MA=MT=M5C=MG=M5C=MT | 5611 | CATCTCTGTG |
| | 4481 | =MA=MG=MT | | AATCGCTAGT |
| 106 | CO- | MT=MA=MA=M5C=MT=MG=MG=MG=MA=MG=MT=MA=MT=MA=MG=MA=MG=M | 5612 | TAACTGGGAG |
| | 4482 | G=MA=M5C | | TATAGAGGAC |
| 107 | CO- | MT=M5C=MA=M5C=MA=MA=MA=MT=MA=MG=MA=MT=MT=MG=MA=MG=MG=M | 5613 | TCACAAATAG |
| | 4483 | G=MT=M5C | | ATTGAGGGTC |
| 108 | CO- | MG=M5C=MT=MA=MA=MT=M5C=M5C=MA=MA=M5C=M5C=MA=M5C=MT=MT=M5 | 5614 | GCTAATCCAA |
| | 4484 | C=MA=MA=M5C | | CCACTTCAAC |
| 109 | CO- | MG=MT=M5C=MA=MA=MG=MA=MT=M5C=M5C=M5C=M5C=MG=MA=MA=MG=MT | 5615 | GTCAAGATCC |
| | 4485 | =MT=MG=MA | | CCGAAGTTGA |
| 110 | CO- | MG=MG=MA=M5C=MT=MG=M5C=MG=MT=MG=MA=M5C=MT=M5C=MA=MG=MG= | 5616 | GGACTGCGTG |
| | 4486 | MT=MT=MA | | ACTCAGGTTA |
| 111 | CO- | MG=M5C=MA=MA=MG=MG=MT=M5C=M5C=MA=MG=MG=MG=MT=MG=MT=MA= | 5617 | GCAAGGTCCA |
| | 4487 | MT=MT=M5C | | GGGTGTATTC |
| 112 | CO- | MA=MA=M5C=MA=MT=MG=MT=M5C=MA=MG=MA=M5C=MA=MG=MT=MA=MG= | 5618 | AACATGTCAG |
| | 4488 | MT=MT=M5C | | ACAGTAGTTC |
| 113 | CO- | M5C=MA=M5C=MA=MG=MA=MG=MT=MG=M5C=M5C=MA=MA=MG=MG=MA=MG | 5619 | CACAGAGTGC |
| | 4489 | =MT=MT=MA | | CAAGGAGTTA |
| 114 | CO- | M5C=MG=MA=MG=MA=MA=MA=MA=MT=MG=MA=MG=MG=MT=MA=M5C=MA= | 5620 | CGAGAAAATG |
| | 4490 | MT=MG=MG | | AGGTACATGG |
| 115 | CO- | MG=MA=MG=MG=MT=MT=MG=MA=M5C=MA=MA=MA=MT=MA=MG=MG=MT=M | 5621 | GAGGTTGACA |
| | 4491 | G=MT=MG | | AATAGGTGTG |
| 116 | CO- | MG=MA=MT=MT=MT=MA=MA=MA=MG=MG=MA=M5C=MT=MG=M5C=MA=MT=M | 5622 | GATTTAAAGG |
| | 4492 | G=MG=M5C | | ACTGCATGGC |
| 117 | CO- | MA=MT=MG=MG=MT=MG=MA=MG=MA=MG=MT=MG=MT=MG=MG=MT=MT=M5C | 5623 | ATGGTGAGAG |
| | 4493 | =MA=MA | | TGTGGTTCAA |
| 118 | CO- | MG=M5C=MA=MG=MG=MA=MT=MG=MA=MA=MG=MT=MT=MT=MA=M5C=MA=M | 5624 | GCAGGATGAA |
| | 4494 | A=MG=MG | | GTTTACAAGG |
| 119 | CO- | MT=MG=MG=MT=MA=MT=M5C=M5C=MA=MT=MT=M5C=MA=M5C=MA=MA=MG= | 5625 | TGGTATCCAT |
| | 4495 | MG=MT=MG | | TCACAAGGTG |
| 120 | CO- | MG=MT=MA=M5C=MT=MA=MG=MA=M5C=MT=M5C=MT=MG=M5C=M5C=MT=MG | 5626 | GTACTAGACT |
| | 4496 | =MT=MG=MT | | CTGCCTGTGT |
| 121 | CO- | MG=MG=MT=MG=MT=MT=MG=MA=MG=MA=MA=M5C=MT=MA=MG=MA=MA=MT | 5627 | GGTGTTGAGA |
| | 4497 | =MA=MT | | ACTAGAATAT |
| 122 | CO- | MG=MT=M5C=M5C=M5C=MT=MG=MT=MG=MG=MT=MT=MA=M5C=M5C=MT=MA | 5628 | GTCCCTGTGG |
| | 4498 | =MA=MA=MG | | TTACCTAAAG |
| 123 | CO- | MA=MA=MG=MG=MA=MA=MG=MG=MT=M5C=MT=MA=MG=M5C=MG=MG=MA= | 5629 | AAGGAAGGTC |
| | 4499 | MG=MG=MT | | TAGCGGAGGT |
| 124 | CO- | MA=MG=MA=M5C=MT=MT=MT=MG=MG=M5C=M5C=MA=MG=MG=M5C=MA=MA= | 5630 | AGACTTTGGC |
| | 4500 | MG=MA=M5C | | CAGGCAAGAC |
| 125 | CO- | MG=M5C=MA=MT=MG=MG=MT=MA=MG=M5C=MT=MA=MG=MT=MG=MA=MT=M | 5631 | GCATGGTAGC |
| | 4501 | A=MA=MT | | TAGTGATAAT |
| 126 | CO- | MA=MA=MA=MT=MG-MT=MT=MG=MG=M5C=M5C-M5C=MT=MT=MG=MA=MG= | 5632 | AAATGTTGGC |
| | 4502 | MG=MA=MG | | CCTTGAGGAG |
| 127 | CO- | MA=MT=MT=MG=MT=MA=MG=MG=MT=MG=M5C-MT=MG=M5C=MG=MG=MG=M | 5633 | ATTGTAGGTG |
| | 4503 | T=MA=MT | | CTGCGGGTAT |
| 128 | CO- | MG=MT=MG=MT=M5C=MT=MA=MT=MT=MT=MG=MG=MT=MA=MT=M5C=MA=M | 5634 | GTGTCTATTT |
| | 4504 | G=MA=M5C | | GGTATCAGAC |
| 129 | CO- | MG=MA=MG=M5C=MA=M5C=MA=M5C=MA=MT=MT=M5C=MA=M5C=MT=M5C=M | 5635 | GAGCACACAT |
| | 4505 | 5C=MA=MT=MT | | TCACTCCATT |
| 130 | CO- | MT=MG=M5C=MA=MT=MT=MG=M5C=MA=MT=MG=MT=MT=MG=MA=MG=M5C= | 5636 | TGCATTGCAT |
| | 4506 | MT=MG=MG | | GTTGAGCTGG |
| 131 | CO- | MG=MA=MA=MG=MA=MA=MT=MG=MG=MG=MA=MG=M5C=MA=MA=MT=M5C= | 5637 | GAAGAATGGG |
| | 4507 | M5C=MG=M5C | | AGCAATCCGC |
| 132 | CO- | MG=MT=MA=MG=MG=MA=MA=MG=MT=MT=MG=MA=MA=MT=MG=MA=MG=MT | 5638 | GTAGGAAGTT |
| | 4508 | =MT=MG | | GAATGAGTTG |
| 133 | CO- | MT=MG=MG=MA=MT=MG=MT=MA=MG=MA=MT=MG=MA=MA=MT=MG=MG=M5C | 5639 | TGGATGTAGA |
| | 4509 | =MA=MA | | TGAATGGCAA |
| 134 | CO- | MG=M5C=M5C=MA=M5C=MA=M5C=MG=MT=MT=MT=M5C=MT=MT=MA=MT=MT= | 5640 | GCCACACGTT |
| | 4510 | MG=M5C=MG | | TCTTATTGCG |
| 135 | CO- | MG=MT=MG=MG=MG=MA=MG=MT=MG=MG=MT=MA=MA=MG=MA=MT=MT=MA | 5641 | GTGGGAGTGG |
| | 4511 | =MG=M5C | | TAAGATTAGC |
| 136 | CO- | MA=MA=M5C=MG=MG-MA-MA-MG=MG=MG-MT-MT=MA-MA=MA=MG=MG=M | 5642 | AACGGAAGGG |
| | 4512 | T=MA=MT | | TTAAAGGTAT |
| 137 | CO- | MG=MT=MG=MA=MG=MG=M5C=MA=MT=M5C=MA=MG=MG=MT=MA=MA=MG=M | 5643 | GTGAGGCATC |
| | 4513 | T=MT=M5C | | AGGTAAGTTC |
| 138 | CO- | MG=M5C=MG=MG=MG=MA=MT=MT=MA=MG=MA=MT=MG=MA=MG=MG=MT=M5 | 5644 | GCGGGATTAG |
| | 4514 | C=MT=MA | | ATGAGGTCTA |
| 139 | CO- | MG=M5C=M5C=M5C=MA=MA=MA=MT=MG=MA=MG=MG=MT=MG=MA=MT=MA= | 5645 | GCCCAAATGA |
| | 4515 | M5C=MA=MA | | GGTGATACAA |
| 140 | CO- | MA=MT=MG=MA=M5C=MA=MT=MG=MA=MT=MA=MG=M5C=MA=M5C=M5C=M5C | 5646 | ATGACATGAT |
| | 4516 | =MA=MA=M5C | | AGCACCCAAC |
| 141 | CO- | M5C=MT=MT=MA=MG=MG=MA=MG=MG=MA=MT=MT=MA=MT=MT=MT=MA=MA | 5647 | CTTAGGAGGA |
| | 4517 | =M5C=M5C | | TTATTTAACC |
| 142 | CO- | M5C=MT=MA=M5C=MT=MA=MG=MT=MT=MG=MT=MT=MA=M5C=MA=M5C=M5C | 5648 | CTACTAGTTG |
| | 4518 | =MT=MT=MA | | TTACACCTTA |
| 143 | CO- | MA=MG=MA=M5C=MT=MG=MG=M5C=MA=MT=MG-MT=MG=MG=M5C=MT=MT= | 5649 | AGACTGGCAT |
| | 4519 | M5C=MA=M5C | | GTGGCTTCAC |
| 144 | CO- | MG=MG=MA=MA=MG=MA=MA=MG=MG=MT=MT=MA=MG=M5C=MA=M5C=MA= | 5650 | GGAAGAAGGT |
| | 4520 | MG=MA=M5C | | TAGCACAGAC |
| 145 | CO- | MG=M5C=MA=MT=MT=MT=M5C=MA=MG=MA=MG=M5C=MA=M5C=MA=MG=MA= | 5651 | GCATTTCAGA |
| | 4521 | MG=MT=MG | | GCACAGAGTG |
| 146 | CO- | M5C=MA=M5C=MT=MG=MG=M5C=M5C=M5C=MA=MT=M5C=MA=MA=MT=MT=M | 5652 | CACTGGCCCA |
| | 4522 | G=M5C=MA=MT | | TCAATTGCAT |
| 147 | CO- | MT=M5C=MT=MG=M5C=MA=MA=MA=MT=MT=MA=MA=MG=MA=MA=MG=M5C= | 5653 | TCTGCAAATT |
| | 4523 | MA=M5C-MT | | AAGAAGCACT |
| 148 | CO- | M5C=MA=MG=MA=MG=MA=MA=MA=M5C=M5C=MT=MA=MA=MA=MA=MT=MT= | 5654 | CAGAGAAACC |
| | 4524 | MG=MA=MG | | TAAAATTGAG |
| 149 | CO- | MA=M5C=M5C=M5C=MA=M5C=MA=MT=MA=MG=MT=MT=MG=MT=MA=M5C=MT | 5655 | ACCCACATAG |
| | 4525 | =M5C=MT=M5C | | TTGTACTCTC |
| 150 | CO- | MG=M5C=MT=MT=MG=MT=MG=MA=MT=MG=MT=M5C=M5C=MA=MG=MA=MT= | 5656 | GCTTGTGATG |
| | 4526 | MG=MA=M5C | | TCCAGATGAC |
| 151 | CO- | MG=MA=MG=M5C=MA=MT=M5C=MA=MG=MG=MT=MA=M5C=M5C=MA=MT=MG= | 5657 | GAGCATCAGG |
| | 4527 | MA=M5C=MA | | TACCATGACA |
| 152 | CO- | M5C=MT=MG=MG=MG=MA=MT=MA=MG=MG=MG=MT=MG=MG=MA=MT=M5C=M | 5658 | CTGGGATAGG |
| | 4528 | T=MA=M5C | | GTGGATCTAC |
| 153 | CO- | MG=MT=MG=MG=MA=MG=M5C=MA=MA=MA=M5C=MT=MA=MG=MG=M5C-MA= | 5659 | GTGGAGCAAA |
| | 4529 | M5C=MT=MG | | CTAGGCACTG |
| 154 | CO- | MG=MA=MG=M5C=M5C=M5C=MT=MA=M5C=M5C=M5C=MA=MG=MA=M5C=MA= | 5660 | GAGCCCTACC |
| | 4530 | MT=MG=MA=MT | | CAGACATGAT |
| 155 | CO- | MT=MA=MA=MA=MT=MG=MG=M5C=M5C=M5C=MA=M5C=MA=MA=MG=MT=MG= | 5661 | TAAATGGCCC |
| | 4531 | MA=MG=MG | | ACAAGTGAGG |
| 156 | CO- | MA=MT=MG=MA=MA=MG=MT=MG=MT=MT=MG=MT=MA=MT=MG=MT=MG=M5C | 5662 | ATGAAGTGTT |
| | 4532 | =M5C=M5C | | GTATGTGCCC |
| 157 | CO- | MA=M5C=MT=MT=MT=M5C=MG=MT=M5C=M5C=MT=MT=MA=MA=MG=MA=MT= | 5663 | ACTTTCGTCC |
| | 4533 | M5C=MA=MT | | TTAAGATCAT |
| 158 | CO- | MA=M5C=MA=MT=MT=MG=MG=MA=M5C=MT=MT=MA=M5C=MT=M5C=MA=MA= | 5664 | ACATTGGACT |
| | 4534 | M5C=MT=M5C | | TACTCAACTC |
| 159 | CO- | MT=MG=MG=M5C=MG=MT=MT=MA=MT=MT=MA=MA=MT=MT=M5C=MT=MA=M5 | 5665 | TGGCGTTATT |
| | 4535 | C=MA=MG | | AATTCTACAG |
| 160 | CO- | MT=MG=M5C=MT=MA=MG=MG=MA=MT=MT=MG=MT=MA=MA=MT=MT=MA=MG | 5666 | TGCTAGGATT |
| | 4536 | =MT=M5C | | GTAATTAGTC |
| 161 | CO- | MG=MA=MG=MT=MG=M5C=MT=MG=MT=MG=MG=MA=MG=MA=MT=M5C=MA=M | 5667 | GAGTGCTGTG |
| | 4537 | A=MT=MG | | GAGATCAATG |
| 162 | CO- | MT=MG=M5C=MT=MT=MA=MT=MG=MA=MA=MT=MG=MA=MA=MG=MT=M5C=M | 5668 | TGCTTATGAA |
| | 4538 | 5C=MA=MT | | TGAAGTCCAT |
| 163 | CO- | MA=M5C=MA=MA=MG=MA=MA=M5C=MT=MA=M5C=M5C=MG=M5C=MA=M5C=M | 5669 | ACAAGAACTA |
| | 4539 | T=M5C=MA=MA | | CCGCACTCAA |
| 164 | CO- | MT=MT=MT=MA=MT=MG=M5C=MA=M5C=MA=MA=MT=MA=MA=MT=MG=MA=M | 5670 | TTTATGCACA |
| | 4540 | G=M5C=M5C | | ATAATGAGCC |
| 165 | CO- | MG=MG=M5C=MA=MA=MT=MT=MA=MT=MA=MA=MA=MG=MG=MT=MA=M5C=M | 5671 | GGCAATTATA |
| | 4541 | 5C=M5C=MT | | AAGGTACCCT |
| 166 | CO- | MG=M5C=M5C=M5C=M5C=MT=MT=MG=M5C=MG=MA=MG=MT=MG=MA=MT=MA | 5672 | GCCCCTTGCG |
| | 4542 | =MA=MA=MT | | AGTGATAAAT |
| 167 | CO- | MA=MA=MT=M5C=M5C=MA=MA=MT=M5C=MT=MA=M5C=M5C=M5C=MA=MT=M | 5673 | AATCCAATCT |
| | 4543 | A=M5C=M5C=M5C | | ACCCATACCC |
| 168 | CO- | MT=M5C=M5C=MA=M5C=MG=MA=M5C=MT=MG=MA=MA=MA=M5C=MA=MT=MG | 5674 | TCCACGACTG |
| | 4544 | =MA=M5C=MT | | AAACATGACT |
| 169 | CO- | MG=MT=MG=MT=MT=M5C=MA=M5C=MT=MT=MA=M5C=MT=MA=MG=M5C=MT= | 5675 | GTGTTCACTT |
| | 4545 | MA=MT=M5C | | ACTAGCTATC |
| 170 | CO- | MG=MT=MG=MT=M5C=MT=MG=MG=MG=MA=MG=MG=MT=MT=MT=MA=MG=MT | 5676 | GTGTCTGGGA |
| | 4546 | =MT=MA | | GGTTTAGTTA |
| 171 | CO- | MG=MA=MG=MG=MA=M5C=MT=MG=MT=MG=M5C=M5C=MA=M5C=MA=MT=MA= | 5677 | GAGGACTGTG |
| | 4547 | MA=M5C=M5C | | CCACATAACC |
| 172 | CO- | M5C=MA=MA=MT=M5C=M5C=MT=MG=MG=MA=MA=MG=MT=MG=MG=M5C=MA= | 5678 | CAATCCTGGA |
| | 4548 | MT=M5C=M5C | | AGTGGCATCC |
| 173 | CO- | MA=MT=MA=MT=MG=MG=MA=MG=M5C=MA=MT=MT=MT=MT=MG=MT=MA=MT | 5679 | ATATGGAGCA |
| | 4549 | =MG=MG | | TTTTGTATGG |
| 174 | CO- | MT=MT=MA=MA=MG=MG=MT=M5C=MT=M5C=M5C=MT=MT=MG=MG=MA=M5C= | 5680 | TTAAGGTCTC |
| | 4550 | MA=MT=MG | | CTTGGACATG |
| 175 | CO- | MT=MG=MA=M5C=MA=MG=MA=MA=MG=M5C=MT=M5C=MT=MA=M5C=M5C=MA | 5681 | TGACAGAAGC |
| | 4551 | =MT=M5C=M5C | | TCTACCATCC |
| 176 | CO- | M5C=M5C=MT=M5C=MA=MT=MG=MT=MG=MA=MA=MG=MT=M5C=M5C=MA=MG | 5682 | CCTCATGTGA |
| | 4552 | =MT=MA=MG | | AGTCCAGTAG |
| 177 | CO- | MG=MG=MT=MA=MG=MT=MG=MA=MT=MA=M5C=MT=MT=MG=M5C=MT=MA=M | 5683 | GGTAGTGATA |
| | 4553 | A=MT=MT | | CTTGCTAATT |
| 178 | CO- | M5C=MT=MT=MG=MT=MT=MG=MG=MA=MT=MG=MA=MT=MT=MT=MG=MG=MT | 5684 | CTTGTTGGAT |
| | 4554 | =MT=MA | | GATTTGGTTA |
| 179 | CO- | MT=MT=MA=MG=MT=MT=MG=MA=M5C=MT=MG=M5C=MA=MG=MA=MG=MG=M | 5685 | TTAGTTGACT |
| | 4555 | G=MA=MG | | GCAGAGGGAG |
| 180 | CO- | MG=MA=MA=MG=MG=MA=M5C=MA=M5C=MA=MA=MT=MT=MT=M5C=MT=MG= | 5686 | GAAGGACACA |
| | 4556 | MT=MA=MG | | ATTTCTGTAG |
| 181 | CO- | MG=M5C=MT=MT=MT=M5C=MT=MT=MA=MG=MG=MT=MA=MG=M5C=MT=MT=M | 5687 | GCTTTCTTAG |
| | 4557 | A=MT=MG | | GTAGCTTATG |
| 182 | CO- | MT=MT=MT=MG-MT=MG=MG=M5C=MA=MT=MA=MG=MA=MG=MA=M5C=MT=M | 5688 | TTTGTGGCAT |
| | 4558 | A=MG=M5C | | AGAGACTAGC |
| 183 | CO- | MG=MT=MG=MT=MA=MA=MA=MG=M5C=M5C=MA=MG=M5C=MA=MT=MG-MA= | 5689 | GTGTAAAGCC |
| | 4559 | MG=MT=M5C | | AGCATGAGTC |
| 184 | CO- | MT=MT=MA=MT=MT=MA=M5C=M5C=MA=M5C=M5C=M5C=MT=MG=MA=MA=MA | 5690 | TTATTACCAC |
| | 4560 | =MA=MT=M5C | | CCTGAAAATC |
| 185 | CO- | MG=M5C=MA=M5C=MA=M5C=M5C=MA=MA=MT=M5C=MA=M5C=MA=MG=MA=M | 5691 | GCACACCAAT |
| | 4561 | A=MG=M5C=MT | | CACAGAAGCT |
| 186 | CO- | MG=MA=MT=MG=MG=MG=MT=MT=MA=MG=MG=M5C=MA=MG=MG=MA=MA=M | 5692 | GATGGGTTAG |
| | 4562 | G=MT=M5C | | GCAGGAAGTC |
| 187 | CO- | MA=MA=M5C=MT=MT=M5C-MT=MG=MT=MT=M5C=MA=M5C=MG=MG=M5C=M5 | 5693 | AACTTCTGTT |
| | 4563 | C=MA=M5C=M5C | | CACGGCCACC |
| 188 | CO- | MA=MG=MT=MG=M5C=M5C=MA=MG=MT=MA=MG=MG=MA=MT=MG=MA=MG=M | 5694 | AGTGCCAGTA |
| | 4564 | T=MT=MG | | GGATGAGTTG |
| 189 | CO- | MG=MA=M5C=M5C=MA=MG=MG=MT=M5C=MA=MT=MA=MA=MA=MT=MA=M5C= | 5695 | GACCAGGTCA |
| | 4565 | MA=MG=M5C | | TAAATACAGC |
| 190 | CO- | MG=MG=MA=MA=MG=MG=MA=M5C=MT=MT=MG=MA=MG=MT=MT=MA=MT=MA | 5696 | GGAAGGACTT |
| | 4566 | =MT=M5C | | GAGTTATATC |
| 191 | CO- | MA=MA=MA=MA=MG=MT=MG=MA=M5C-M5C=M5C=MA=MT=M5C=MA=MG=MT= | 5697 | AAAAGTGACC |
| | 4567 | MA=MT=MG | | CATCAGTATG |
| 192 | CO- | MT=MG=MT=MT=MT=MG=MA=MT=MG=M5C=MA=MG=MA=M5C=M5C=MT=MT=M | 5698 | TGTTTGATGC |
| | 4568 | A=MA=MG | | AGACCTTAAG |
| 193 | CO- | MT=MT=MA=M5C=MA=MG=MT=MT=MA=MG=MT=MG=MT=M5C=M5C=MT=MT=M | 5699 | TTACAGTTAG |
| | 4569 | G=MA=MG | | TGTCCTTGAG |
| 194 | CO- | M5C=MA=MA=MA=MT=MG=MT=MT=MA=M5C=MG=M5C=MT=MG=MG=M5C=MT= | 5700 | CAAATGTTAC |
| | 4570 | MA=M5C=M5C | | GCTGGCTACC |
| 195 | CO- | MA=MT=MT=MG=MA=MA=MG=MA=MT=MT=MG=M5C=MA=M5C=MT=MA=MT=M | 5701 | ATTGAAGATT |
| | 4571 | G=MG=MA | | GCACTATGGA |
| 196 | CO- | MG=MT=MA=MG=MA=MA=MT=MT=M5C=MA=MG=M5C=M5C=MA=MA=MT=MA= | 5702 | GTAGAATTCA |
| | 4572 | MG=MT=MT | | GCCAATAGTT |
| 197 | CO- | M5C=MT=MG=MT=MG=MG=MA=M5C=M5C=MA=MA=MT=MT=MT=MG=MG=MA= | 5703 | CTGTGGACCA |
| | 4573 | MA=M5C=M5C | | ATTTGGAACC |
| 198 | CO- | MA=MG=M5C=M5C=MT=M5C=M5C=MT=M5C=MA=MT=MT=MA=M5C=M5C=M5C= | 5704 | AGCCTCCTCA |
| | 4574 | MA=MG=MT=MA | | TTACCCAGTA |
| 199 | CO- | MG=M5C=MT=M5C=MT=MG=MA=MA=MA=MG=MT=MG=MT=MG=MA=M5C=MT= | 5705 | GCTCTGAAAG |
| | 4575 | MA=M5C=MT | | TGTGACTACT |
| 200 | CO- | MT=MG=MG=M5C=MG=MG=MG=MA=MA=MT=M5C=MA=MT=MG=MG=MA=MG=M | 5706 | TGGCGGGAAT |
| | 4576 | T=MG=M5C | | CATGGAGTGC |
| 201 | CO- | MG=MG=MA=MG=MT=MG=MG=MA=MG=MT=MA=MA=MG=M5C=MA=MA=MG=M | 5707 | GGAGTGGAGT |
| | 4577 | A=M5C=MT | | AAGCAAGACT |
| 202 | CO- | M5C=MT=MG=MG=MT=MG=MT=MA=MT=MG=MT=MA=MA=MG=MG=MA=MA=MG | 5708 | CTGGTGTATG |
| | 4578 | =M5C=MT | | TAAGGAAGCT |
| 203 | CO- | MG=MG=MA=MA=M5C=MA=MA=MG=MT=MA=M5C=MA=MT=MG=MG=MG=MT=M | 5709 | GGAACAAGTA |
| | 4579 | A=MT=M5C | | CATGGGTATC |
| 204 | CO- | MT=MA=MA=M5C=MT=MG=MG=MG=MT=MT=MT=MT=MA=MT=MG=MG=MA=MA | 5710 | TAACTGGGTT |
| | 4580 | =MG=MG | | TTATGGAAGG |
| 205 | CO- | MT=MG=MT=M5C=MA=MG=MT=MT=MA=MG=M5C=MG=MT=MG=MT=MG=MA=M | 5711 | TGTCAGTTAG |
| | 4581 | G=MG=MG | | CGTGTGAGGG |
| 206 | CO- | MA=M5C=MG=MT=MA=MT=MG=M5C=MT=MG=MT=MG=MT=MG=MA=MG=MA=M | 5712 | ACGTATGCTG |
| | 4582 | G=MA=MG | | TGTGAGAGAG |
| 207 | CO- | MA=MG=MG=MG=MA=MT=MA=MT=MG-MA=MT=MA=MG=MG=MG=MA=MG=MT | 5713 | AGGGATATGA |
| | 4583 | =MG=MT | | TAGGGAGTGT |
| 208 | CO- | MA=MT=MG=MG=MT=MG=MT=MA=MA=MA=MT=MG=MG=MT=MA=MT=MG=MG= | 5714 | ATGGTGTAAA |
| | 4584 | MA=MG | | TGGTATGGAG |
| 209 | CO- | MG=MT=MT=MT=MA=MG=MT=MT=MG=MA=M5C=MT=MG=M5C=MA=MG=MA=M | 5715 | GTTTAGTTGA |
| | 6669 | G=MG=MG | | CTGCAGAGGG |
| 210 | CO- | MT=MA=MG=MT=MT=MT=MA=MG=MT=MT=MG=MA=M5C=MT=MG=M5C=MA=M | 5716 | TAGTTTAGTT |
| | 6670 | G=MA=MG | | GACTGCAGAG |
| 211 | CO- | MT=MT=M5C=MT=MG=MT=MA=MG=MT=MT=MT=MA=MG=MT=MT=MG=MA=M5C | 5717 | TTCTGTAGTT |
| | 6671 | =MT=MG | | TAGTTGACTG |
| 212 | CO- | MA=MG=MG=MA=M5C=MA=M5C=MA=MA=MT=MT=MT=M5C=MT=MG=MT=MA= | 5718 | AGGACACAAT |
| | 6672 | MG=MT=MT | | TTCTGTAGTT |
| 213 | CO- | MG=MA=MA=MG=MG=dA=d5C=dA=d5C=dA=dA=dT=dT=dT=d5C=MT=MG= | 5719 | GAAGGACACA |
| | 6673 | MT=MA=MG | | ATTTCTGTAG |
| 214 | CO- | MT=MG=MG=MA=MA=MG=MG=MA=M5C=MA=M5C=MA=MA=MT=MT=MT=M5C= | 5720 | TGGAAGGACA |
| | 6674 | MT=MG=MT | | CAATTTCTGT |
| 215 | CO- | MA=MG=M5C=MA=MA=MG=M5C=MT=MG=MT=MG=MT=MG=MG=MA=MA=MG=M | 5721 | AGCAAGCTGT |
| | 6675 | G=MA=M5C | | GTGGAAGGAC |
| 216 | CO- | MT=MA=MA=MA=MG=M5C=MA=MA=MG=M5C=MT=MG=MT=MG=MT=MG=MG=M | 5722 | TAAAGCAAGC |
| | 6676 | A=MA=MG | | TGTGTGGAAG |
| 217 | CO- | MT=MG=MG=M5C=MA=MA=MG=MG=MA=MG=MA=MG=MG=MA=MT=MG=MA=M | 5723 | TGGCAAGGAG |
| | 6965 | G=MT=MA | | AGGATGAGTA |
| 218 | CO- | MA=MT=MG=MA=MA=MT=MG=MG=M5C=MA=MA=MG=MG=MA=MG=MA=MG=M | 5724 | ATGAATGGCA |
| | 6966 | G=MA=MT | | AGGAGAGGAT |
| 219 | CO- | MG=MA=MT=MG=MT=MA=MG=MA=MT=MG=MA=MA=MT=MG=MG=M5C=MA=M | 5725 | GATGTAGATG |
| | 6967 | A=MG=MG | | AATGGCAAGG |
| 220 | CO- | MT=MG=MG=MA=MT=dG=dT=dA=dG=dA=dT=dG=dA=dA=dT=MG=MG=M5C | 5726 | TGGATGTAGA |
| | 6968 | =MA=MA | | TGAATGGCAA |
| 221 | CO- | MT=MG=MT=MG=MG=MA=MT=MG=MT=MA=MG=MA=MT=MG=MA=MA=MT=MG= | 5727 | TGTGGATGTA |
| | 6969 | MG=M5C | | GATGAATGGC |
| 222 | CO- | MG=MG=MG=MT=MG=MT=MG=MG=MA=MT=MG=MT=MA=MG=MA=MT=MG=MA | 5728 | GGGTGTGGAT |
| | 6970 | =MA=MT | | GTAGATGAAT |
| 223 | CO- | MA=MT=MG=MG=MG=MT=MG=MT=MG=MG=MA=MT=MG=MT=MA=MG=MA=MT= | 5729 | ATGGGTGTGG |
| | 6971 | MG=MA | | ATGTAGATGA |
| 224 | CO- | MA=MA=MA=MT=MG=MG=MG=MT=MG=MT=MG=MG=MA=MT=MG=MT=MA=MG | 5730 | AAATGGGTGT |
| | 6972 | =MA=MT | | GGATGTAGAT |
| 225 | CO- | MA=MA=MA=MA=MA=MT=MG=MG-MG-MT=MG-MT=MG=MG=MA=MT=MG=MT | 5731 | AAAAATGGGT |
| | 6973 | =MA=MG | | GTGGATGTAG |
| 226 | CO- | MT=MG=MG=MG=MA=MA=MG=MT=MT=MT=MA=MA=MA=MA=MA=MA=MT=MG | 5732 | TGGGAAGTTT |
| | 6974 | =MG=MG | | AAAAAATGGG |
| 227 | CO- | M5C=MT=MG=MA=MA=MG=MT=MG=MG=MA=MG=MG=MT=MG=MG=MT=MG=M | 5733 | CTGAAGTGGA |
| | 6975 | G=MA=MA | | GGTGGTGGAA |
| 228 | CO- | MT=M5C=M5C=MT=MG=MA=MA=MG=MT=MG=MG=MA=MG=MG=MT=MG=MG=M | 5734 | TCCTGAAGTG |
| | 6976 | T=MG=MG | | GAGGTGGTGG |
| 229 | CO- | MG=MG=MT=MA=MA=MG=MT=MT=M5C=M5C=MT=MG=MA=MA=MG=MT=MG=M | 5735 | GGTAAGTTCC |
| | 6977 | G=MA=MG | | TGAAGTGGAG |
| 230 | CO- | MG=MA=MG=MG=M5C=MA=MT=M5C=MA=MG=MG=MT=MA=MA=MG=MT=MT=M | 5736 | GAGGCATCAG |
| | 6978 | 5C=M5C=MT | | GTAAGTTCCT |
| 231 | CO- | MG=MT=MG=MA=MG=dG=d5C=dA=dT=d5C=dA=dG=dG=dT=dA=MA=MG= | 5737 | GTGAGGCATC |
| | 6979 | MT=MT=M5C | | AGGTAAGTTC |
| 232 | CO- | MA=MA=MG=MT=MG=MA=MG=MG=M5C=MA=MT=M5C=MA=MG=MG=MT=MA=M | 5738 | AAGTGAGGCA |
| | 6980 | A=MG=MT | | TCAGGTAAGT |
| 233 | CO- | MA=M5C=MA=MG=MA=MA=MG=MT=MG=MA=MG=MG=M5C=MA=MT=M5C=MA= | 5739 | ACAGAAGTGA |
| | 6981 | MG=MG=MT | | GGCATCAGGT |
| 234 | CO- | MA=MA=MG=MA=M5C=MA=MG=MA=MA=MG=MT=MG=MA=MG=MG=M5C=MA= | 5740 | AAGACAGAAG |
| | 6982 | MT=M5C=MA | | TGAGGCATCA |
| 235 | CO- | MA=MG=MA=MA=MG=MA=M5C=MA=MG=MA=MA=MG=MT=MG=MA=MG=MG=M | 5741 | AGAAGACAGA |
| | 6983 | 5C=MA=MT | | AGTGAGGCAT |
| 236 | CO- | MT=MG=MA=MG=MG=MT=M5C=MT=MA=MA=MT=MT=MT=MA=MG=MA=MA=MG | 5742 | TGAGGTCTAA |
| | 6984 | =MA=M5C | | TTTAGAAGAC |
| 237 | CO- | MT=MG=MG=MA=MT=.LG=dT=dA=.LG=dA=dT=.LG=dA=dA=.LT=MG= | 5743 | TGGATGTAGA |
| | 6985 | MG=M5C=MA=MA | | TGAATGGCAA |
| 238 | CO- | MT=MG=MG=.LA=MT=dG=dT=.LA=dG=dA=dT=.LG=dA=dA=dT=.LG= | 5744 | TGGATGTAGA |
| | 6986 | MG=M5C=MA=MA | | TGAATGGCAA |
| 239 | CO- | MT=MG=MG=MA=.LT=dG=dT=dA=.LG=dA=dT=dG=.LA=dA=dT=MG= | 5745 | TGGATGTAGA |
| | 6987 | .LG=M5C=MA=MA | | TGAATGGCAA |
| 240 | CO- | MT=MG=MG=.LA=MT=.LG=MT=.LA=MG=.LA=MT=.LG=MA=.LA=MT= | 5746 | TGGATGTAGA |
| | 6988 | .LG=MG=.L5C=MA=MA | | TGAATGGCAA |
| 241 | CO- | MT=MG=.LG=MA=.LT=MG=.LT=MA=.LG=MA=.LT=MG=.LA=MA=.LT=MG= | 5747 | TGGATGTAGA |
| | 6989 | .LG=M5C=MA=MA | | TGAATGGCAA |
| 242 | CO- | MT=MG=.LG=MA=MT=.LG=MT=MA=.LG=MA=MT=.LG=MA=MA=.LT=MG=MG= | 5748 | TGGATGTAGA |
| | 6990 | .L5C=MA=MA | | TGAATGGCAA |
| 243 | CO- | MT=MG=MG=MA=.LT=MG=MT=MA=.LG=MA=MT=MG=.LA=MA=MT=MG=.LG=M5C | 5749 | TGGATGTAGA |
| | 6991 | =MA=MA | | TGAATGGCAA |
| 244 | CO- | MT=MG=MG=.LA=MT=MG-MT=.LA=MG=MA=MT=.LG=MA=MA=MT=.LG=MG=M5C | 5750 | TGGATGTAGA |
| | 6992 | =MA=MA | | TGAATGGCAA |
| 245 | CO- | MT=MG=MG=MA=MT=.LG=MT=MA=MG=MA=.LT=MG=MA=MA=MT=.LG=MG=M5C | 5751 | TGGATGTAGA |
| | 6993 | =MA=MA | | TGAATGGCAA |
| 246 | CO- | MT=MG=MG=MA=.LT=MG=MT=MA=MG=.LA=MT=MG=MA=MA=.LT=MG=MG=M5C | 5752 | TGGATGTAGA |
| | 6994 | =MA=MA | | TGAATGGCAA |
| 247 | CO- | MG=MT=MG=MA=MG=.LG=d5C=dA=.LT=d5C=dA=.LG=dG=dT=.LA=MA= | 5753 | GTGAGGCATC |
| | 6995 | MG=MT=MT=M5C | | AGGTAAGTTC |
| 248 | CO- | MG=MT=MG=.LA=MG=dG=d5C=.LA=dT=d5C=dA=.LG=dG=dT=dA=.LA= | 5754 | GTGAGGCATC |
| | 6996 | MG=MT=MT=M5C | | AGGTAAGTTC |
| 249 | CO- | MG=MT=MG=MA=.LG=dG=d5C=dA=.LT=d5C=dA=dG=.LG=dT=dA=MA= | 5755 | GTGAGGCATC |
| | 6997 | .LG=MT=MT=M5C | | AGGTAAGTTC |
| 250 | CO- | MG=MT=MG=.LA=MG=.LG=M5C=.LA=MT=.L5C=MA=.LG-MG=.LT=MA= | 5756 | GTGAGGCATC |
| | 6998 | .LA=MG=.LT=MT=M5C | | AGGTAAGTTC |
| 251 | CO- | MG=MT=.LG=MA=.LG=MG=.L5C=MA=.LT=M5C=.LA=MG=.LG-MT=.LA= | 5757 | GTGAGGCATC |
| | 6999 | MA=.LG=MT=MT=M5C | | AGGTAAGTTC |
| 252 | CO- | MG=MT=.LG=MA=MG=.LG=M5C=MA=.LT=M5C=MA=.LG=MG=MT=.LA=MA= | 5758 | GTGAGGCATC |
| | 7000 | MG=.LT=MT=M5C | | AGGTAAGTTC |
| 253 | CO- | MG=MT=MG=MA=.LG=MG=M5C=MA=.LT=M5C=MA=MG=.LG-MT=MA=MA=.LG=M | 5759 | GTGAGGCATC |
| | 7001 | T=MT=M5C | | AGGTAAGTTC |
| 254 | CO- | MG=MT=MG=.LA=MG=MG=M5C=.LA=MT=M5C=MA=.LG=MG=MT=MA=.LA=MG=M | 5760 | GTGAGGCATC |
| | 7002 | T=MT=M5C | | AGGTAAGTTC |
| 255 | CO- | MG=MT=MG=MA=MG=.LG=M5C=MA=MT=M5C=.LA=MG=MG=MT=MA=.LA=MG=M | 5761 | GTGAGGCATC |
| | 7003 | T=MT=M5C | | AGGTAAGTTC |
| 256 | CO- | MG=MT=MG=MA=.LG=MG=M5C=MA=MT=.L5C=MA=MG=MG=MT=.LA=MA=MG=M | 5762 | GTGAGGCATC |
| | 7004 | T=MT=M5C | | AGGTAAGTTC |
| 257 | CO- | MG=MT=MG=MG=MA=MT=dG=dT=dA=dG=dA=dT=dG=dA=dA=dT=MG=MG=M5C=M | 5763 | GTGGATGTAG |
| | 7005 | A=MA=MG | | ATGAATGGCA |
| | | | | AG |
| 258 | CO- | MG=MT=MG=MG=MA=MT=MG=MT=MA=MG=MA=MT=MG=MA=MA=MT=MG=MG | 5764 | GTGGATGTAG |
| | 7006 | =M5C=MA=MA=MG | | ATGAATGGCA |
| | | | | AG |
| 259 | CO- | MG=MT=MG=MG=MA=dT=dG=dT=MA=dG=dA=dT=dG=MA=dA=dT=dG=MG=M5C=M | 5765 | GTGGATGTAG |
| | 7007 | A=MA=MG | | ATGAATGGCA |
| | | | | AG |
| 260 | CO- | MG=MT=MG=MG=MA=.LT=dG=dT=.LA=dG=dA=dT=dG=.LA=dA=dT= | 5766 | GTGGATGTAG |
| | 7008 | .LG=MG=M5C=MA=MA=MG | | ATGAATGGCA |
| | | | | AG |
| 261 | CO- | MT=MG=MT=MG=MG=MA=MT=dG=dT=dA=dG-dA=dT=dG=dA=dA=dT=MG=MG=M5 | 5767 | TGTGGATGTA |
| | 7009 | C=MA=MA=MG=MG | | GATGAATGGC |
| | | | | AAGG |
| 262 | CO- | MT=MG=MT=MG=MG=MA=MT=MG=MT=MA=MG=MA=MT=MG=MA=MA=MT=MG= | 5768 | TGTGGATGTA |
| | 7010 | MG=M5C=MA=MA=MG=MG | | GATGAATGGC |
| | | | | AAGG |
| 263 | CO- | MT=MG=MT=MG=MG=dA=dT=MG=dT=dA=MG=dA=dT=MG=dA=dA=MT=dG=dG=M5 | 5769 | TGTGGATGTA |
| | 7011 | C=MA=MA=MG=MG | | GATGAATGGC |
| | | | | AAGG |
| 264 | CO- | MT=MG=MT=MG=MG=dA=dT=.LG=dT=dA=.LG=dA=dT=.LG=dA=dA=.LT | 5770 | TGTGGATGTA |
| | 7012 | =dG=dG=M5C=MA=MA=MG=MG | | GATGAATGGC |
| | | | | AAGG |
| 265 | CO- | MA=MG=MT=MG=MA=MG=dG=d5C=dA=dT=d5C=dA=dG=dG=dT=dA=MA=MG=MT= | 5771 | AGTGAGGCAT |
| | 7013 | MT=M5C=M5C | | CAGGTAAGTT |
| | | | | CC |
| 266 | CO- | MA=MG=MT=MG=MA=MG=MG=M5C=MA=MT=M5C=MA=MG=MG=MT=MA=MA=M | 5772 | AGTGAGGCAT |
| | 7014 | G=MT=MT=M5C=M5C | | CAGGTAAGTT |
| | | | | CC |
| 267 | CO- | MA=MG=MT=MG=MA=dG=dG=d5C=MA=dT=d5C=dA=dG=MG=dT=dA=dA=MG=MT= | 5773 | AGTGAGGCAT |
| | 7015 | MT=M5C=M5C | | CAGGTAAGTT |
| | | | | CC |
| 268 | CO- | MA=MG=MT=MG=MA=.LG=dG=d5C=.LA=dT=d5C=dA=dG=.LG=dT=dA= | 5774 | AGTGAGGCAT |
| | 7016 | .LA=MG=MT=MT=M5C=M5C | | CAGGTAAGTT |
| | | | | CC |
| 269 | CO- | MA=MA=MG=MT=MG=MA=MG=dG=d5C=dA=dT=d5C=dA=dG=dG=dT=dA=MA=MG= | 5775 | AAGTGAGGCA |
| | 7017 | MT=MT=M5C=M5C=MT | | TCAGGTAAGT |
| | | | | TCCT |
| 270 | CO- | MA=MA=MG=MT=MG=MA=MG=MG=M5C=MA=MT=M5C=MA=MG=MG=MT=MA=M | 5776 | AAGTGAGGCA |
| | 7018 | A=MG=MT=MT=M5C=M5C=MT | | TCAGGTAAGT |
| | | | | TCCT |
| 271 | CO- | MA=MA=MG=MT=MG=dA=dG=MG=d5C=dA=MT=d5C=dA=MG=dG=dT=MA=dA=dG= | 5777 | AAGTGAGGCA |
| | 7019 | MT=MT=M5C=M5C=MT | | TCAGGTAAGT |
| | | | | TCCT |
| 272 | CO- | MA=MA=MG=MT=MG=dA=dG=.LG=d5C=dA=.LT=d5C=dA=.LG=dG=dT= | 5778 | AAGTGAGGCA |
| | 7020 | .LA=dA=dG=MT=MT=M5C=M5C=MT | | TCAGGTAAGT |
| | | | | TCCT |
| 273 | CO- | MT=MG=MG=MA=MA=MA=MA=MT=MA=MA=MT=MG=M5C=M5C=MT=MT=MT=M | 5779 | TGGAAAATAA |
| | 7021 | 5C=MT=MA | | TGCCTTTCTA |
| 274 | CO- | MT=M5C=MT=MG=MG=dA=dA=dA=dA=dT=dA=dA=dT=dG=d5C=M5C=MT= | 5780 | TCTGGAAAAT |
| | 7022 | MT=MT=M5C | | AATGCCTTTC |
| 275 | CO- | M5C=MT=MT=MA=MT=M5C=MT=MG=MG=MA=MA=MA=MA=MT=MA=MA=MT=M | 5781 | CTTATCTGGA |
| | 7023 | G=M5C=M5C | | AAATAATGCC |
| 276 | CO- | MG=M5C=MT=MT=MA=MT=M5C=MT=MG=MG=MA=MA=MA=MA=MT=MA=MA=M | 5782 | GCTTATCTGG |
| | 7024 | T=MG=M5C | | AAAATAATGC |
| 277 | CO- | MA=MG=MT=MG=MA=MG=M5C=MT=MT=MA=MT=M5C=MT=MG=MG=MA=MA=M | 5783 | AGTGAGCTTA |
| | 7025 | A=MA=MT | | TCTGGAAAAT |
| 278 | CO- | MA=M5C=MA=MG=MT=MG=MA=MG=M5C=MT=MT=MA=MT=M5C=MT=MG=MG= | 5784 | ACAGTGAGCT |
| | 7026 | MA=MA=MA | | TATCTGGAAA |
| 279 | CO- | M5C=MG=MA=M5C=MA=MG=MT=MG=MA=MG=M5C=MT=MT=MA=MT=M5C=MT= | 5785 | CGACAGTGAG |
| | 7027 | MG=MG=MA | | CTTATCTGGA |
| 280 | CO- | MA=M5C=M5C=MG=MA=M5C=MA=MG=MT=MG=MA=MG=M5C=MT=MT=MA=MT= | 5786 | ACCGACAGTG |
| | 7028 | M5C=MT=MG | | AGCTTATCTG |
| 281 | CO- | MA=MT=M5C=MG=M5C=MT=MG=MT=MG=MG=M5C=MA=MG=MT=MT=MA=MA= | 5787 | ATCGCTGTGG |
| | 7029 | M5C=MT=MT | | CAGTTAACTT |
| 282 | CO- | MA=MG=MA=MA=MT=M5C=MG=M5C=MT=MG-MT=MG-MG=M5C=MA=MG=MT= | 5788 | AGAATCGCTG |
| | 7030 | MT=MA=MA | | TGGCAGTTAA |
| 283 | CO- | MA=MA=MA=MG=MA=MA=MT=M5C=MG=M5C=MT=MG=MT=MG=MG=M5C=MA= | 5789 | AAAGAATCGC |
| | 7031 | MG=MT=MT | | TGTGGCAGTT |
| 284 | CO- | MA=M5C=MA=MA=MA=MG=MA=MA=MT=M5C=MG=M5C=MT=MG=MT=MG=MG= | 5790 | ACAAAGAATC |
| | 7032 | M5C=MA=MG | | GCTGTGGCAG |
| 285 | CO- | MG=MA=MG=MA=M5C=MA=MA=MA=MG=MA=MA=MT=M5C=MG=M5C=MT=MG= | 5791 | GAGACAAAGA |
| | 7033 | MT=MG=MG | | ATCGCTGTGG |
| 286 | CO- | MT=MT=MA=MG=MA=MG=MA=M5C=MA=MA=MA=MG=MA=MA=MT=M5C=MG=M | 5792 | TTAGAGACAA |
| | 7034 | 5C=MT=MG | | AGAATCGCTG |
| 287 | CO- | M5C=MA=MT=MT=MT=dA=dG=dA=dG=dA=d5C=dA=dA=dA=dG=MA=MA=MT= | 5793 | CATTTAGAGA |
| | 7035 | M5C=MG | | CAAAGAATCG |
| 288 | CO- | MG=MT=MA=M5C=MA=MT=MT=MT=MA=MG=MA=MG=MA=M5C=MA=MA=MA=M | 5794 | GTACATTTAG |
| | 7036 | G=MA=MA | | AGACAAAGAA |
| 289 | CO- | M5C=MT=MG=MT=MA=M5C=MA=MT=MT=MT=MA=MG=MA=MG=MA=M5C=MA= | 5795 | CTGTACATTT |
| | 7037 | MA=MA=MG | | AGAGACAAAG |
| 290 | CO- | MA=MA=M5C=MT=MG=MT=MA=M5C=MA=MT=MT=MT=MA=MG=MA=MG=MA=M | 5796 | AACTGTACAT |
| | 7038 | 5C=MA=MA | | TTAGAGACAA |
| 291 | CO- | MG=MG=MA=MA=MA=MG=MA=MA=M5C=MT=MG=MT=MA=M5C=MA=MT=MT=M | 5797 | GGAAAGAACT |
| | 7039 | T=MA=MG | | GTACATTTAG |
| 292 | CO- | MA=MA=MG=MA=MG=MG=MA=MA=MA=MG=MA=MA=M5C=MT=MG=MG=M5C= | 5798 | AAGAGGAAAG |
| | 7040 | M5C=MG=MG | | AACTGGCCGG |
| 293 | CO- | MG=MT=M5C=MA=MA=MG=MA=MG-MG=MA=MA=MA=MG=MA=MA=M5C=MT= | 5799 | GTCAAGAGGA |
| | 7041 | MG=MG=M5C | | AAGAACTGGC |
| 294 | CO- | M5C=MT=MT=MG=MG=MT=M5C=MA=MA=MG=MA=MG=MG=MA=MA=MA=MG=M | 5800 | CTTGGTCAAG |
| | 7042 | A=MA=M5C | | AGGAAAGAAC |
| 295 | CO- | MT=MT=MG=M5C=MT=MT=MG=MG=MT=M5C=MA=MA=MG=MA=MG=MG=MA=M | 5801 | TTGCTTGGTC |
| | 7043 | A=MA=MG | | AAGAGGAAAG |
| 296 | CO- | MT=MT=MT=MT=MG=M5C=MT=MT=MG=MG=MT=M5C=MA=MA=MG=MA=MG=M | 5802 | TTTTGCTTGG |
| | 7044 | G=MA=MA | | TCAAGAGGAA |
| 297 | CO- | MT=MG=MT=MT=MT=dT=dG=d5C=dT=dT=dG=dG=dT=d5C=dA=MA=MG= | 5803 | TGTTTTGCTT |
| | 7045 | MA=MG=MG | | GGTCAAGAGG |
| 298 | CO- | MT=MG=MT=MG=MT=MT=MT=MT=MG=M5C=MT=MT=MG=MG=MT=M5C=MA=MA | 5804 | TGTGTTTTGC |
| | 7046 | =MG=MA | | TTGGTCAAGA |
| 299 | CO- | MG=MA=MG=MT=MT=MG=MT=MG=MT=MT=MT=MT=MG=M5C=MT=MT=MG=MG | 5805 | GAGTTGTGTT |
| | 7047 | =MT=M5C | | TTGCTTGGTC |
| 300 | CO- | MT=MG=MG=MA=MG=MT=MT=MG=MT=MG=MT=MT=MT=MT=MG=M5C=MT=MT= | 5806 | TGGAGTTGTG |
| | 7048 | MG=MG | | TTTTGCTTGG |
| 301 | CO- | MT=MA=M5C=MT=MG=MG=MA=MG=MT=MT=MG=MT=MG=MT=MT=MT=MT=MG | 5807 | TACTGGAGTT |
| | 7049 | =M5C=MT | | GTGTTTTGCT |
| 302 | CO- | MT=MT=MG=MG=MT=MT=M5C=M5C=M5C=M5C=M5C=MT=MG=M5C=MT=MG=MT | 5808 | TTGGTTCCCC |
| | 7050 | =MG=M5C=MT | | CTGCTGTGCT |
| 303 | CO- | MA=M5C=M5C=MT=MT=MG=MG=MT=MT=M5C=M5C=M5C=M5C=M5C=MT=MG=M | 5809 | ACCTTGGTTC |
| | 7051 | 5C=MT=MG=MT | | CCCCTGCTGT |
| 304 | CO- | MT=M5C=MA=M5C=M5C=MT=MT=MG=MG=MT=MT=M5C=M5C=M5C=M5C=M5C= | 5810 | TCACCTTGGT |
| | 7052 | MT=MG=M5C=MT | | TCCCCCTGCT |
| 305 | CO- | M5C=M5C=MT=M5C=MA=M5C=M5C=MT=MT=MG=MG=MT=MT=M5C=M5C=M5C= | 5811 | CCTCACCTTG |
| | 7053 | M5C=M5C=MT=MG | | GTTCCCCCTG |
| 306 | CO- | MA=M5C=M5C=M5C=M5C=d5C=d5C=dT=d5C=dA=d5C=d5C=dT=dT=dG=MG= | 5812 | ACCCCCCTCA |
| | 7054 | MT=MT=M5C=M5C | | CCTTGGTTCC |
| 307 | CO- | MT=M5C=MA=M5C=M5C=M5C=M5C=M5C=M5C-MT=M5C=MA=M5C=M5C=MT=MT | 5813 | TCACCCCCCT |
| | 7055 | =MG=MG=MT=MT | | CACCTTGGTT |
| 308 | CO- | MT=MG=M5C=MT=M5C=MA=M5C=M5C=M5C=M5C=M5C=M5C=MT=M5C=MA=M5C | 5814 | TGCTCACCCC |
| | 7056 | =M5C=MT=MT=MG | | CCTCACCTTG |
| 309 | CO- | MA=M5C=MT=MG=M5C=MT=M5C=MA=M5C=M5C=M5C=M5C=M5C=M5C=MT=M5C | 5815 | ACTGCTCACC |
| | 7057 | =MA=M5C=M5C=MT | | CCCCTCACCT |
| 310 | CO- | MT=M5C=MT=MG=MG=.LA=dA=dA=.LA=dT=dA=.LA=dT=dG=.L5C=M5C= | 5816 | TCTGGAAAAT |
| | 7058 | MT=MT=MT=M5C | | AATGCCTTTC |
| 311 | CO- | MT=M5C=MT=.LG=MG=dA=dA=.LA=dA=dT=dA=.LA=dT=dG=d5C=.L5C= | 5817 | TCTGGAAAAT |
| | 7059 | MT=MT=MT=M5C | | AATGCCTTTC |
| 312 | CO- | MT=M5C=MT=MG=.LG=dA=dA=dA=.LA=dT=dA=dA=.LT=dG=d5C=M5C= | 5818 | TCTGGAAAAT |
| | 7060 | .LT=MT=MT=M5C | | AATGCCTTTC |
| 313 | CO- | MT=M5C=MT=.LG=MG=.LA=MA=.LA=MA=.LT=MA=.LA=MT=.LG=M5C= | 5819 | TCTGGAAAAT |
| | 7061 | .L5C=MT=.LT=MT=M5C | | AATGCCTTTC |
| 314 | CO- | MT=M5C=.LT=MG=.LG=MA=.LA=MA=.LA=MT=.LA=MA=.LT=MG=.L5C=M5C= | 5820 | TCTGGAAAAT |
| | 7062 | .LT=MT=MT=M5C | | AATGCCTTTC |
| 315 | CO- | MT=M5C=.LT=MG=MG=.LA=MA=MA=.LA=MT=MA=.LA=MT=MG=.L5C=M5C= | 5821 | TCTGGAAAAT |
| | 7063 | MT=.LT=MT=M5C | | AATGCCTTTC |
| 316 | CO- | MT=M5C=MT=MG=.LG=MA=MA=MA=.LA=MT=MA=MA=.LT=MG=M5C=M5C=.LT= | 5822 | TCTGGAAAAT |
| | 7064 | MT=MT=M5C | | AATGCCTTTC |
| 317 | CO- | MT=M5C=MT=.LG=MG=MA=MA=.LA=MA=MT=MA=.LA=MT=MG=M5C=.L5C=MT= | 5823 | TCTGGAAAAT |
| | 7065 | MT=MT=M5C | | AATGCCTTTC |
| 318 | CO- | MT=M5C=MT=MG=MG=.LA=MA=MA=MA=MT=.LA=MA=MT=MG=M5C=.L5C=MT= | 5824 | TCTGGAAAAT |
| | 7066 | MT=MT=M5C | | AATGCCTTTC |
| 319 | CO- | MT=M5C=MT=MG=.LG=MA=MA=MA=MA=.LT=MA=MA=MT=MG=.L5C=M5C=MT= | 5825 | TCTGGAAAAT |
| | 7067 | MT=MT=M5C | | AATGCCTTTC |
| 320 | CO- | M5C=MA=MT=MT=MT=.LA=dG=dA=.LG=dA=d5C=.LA=dA=dA=.LG=MA= | 5826 | CATTTAGAGA |
| | 7068 | MA=MT=M5C=MG | | CAAAGAATCG |
| 321 | CO- | M5C=MA=MT=.LT=MT=dA=dG=.LA=dG=dA=d5C=.LA=dA=dA=dG=.LA=MA | 5827 | CATTTAGAGA |
| | 7069 | =MT=M5C=MG | | CAAAGAATCG |
| 322 | CO- | M5C=MA=MT=MT=.LT=dA=dG=dA=.LG=dA=d5C=dA=.LA=dA=dG=MA=.LA= | 5828 | CATTTAGAGA |
| | 7070 | MT=M5C=MG | | CAAAGAATCG |
| 323 | CO- | M5C=MA=MT=.LT=MT=.LA=MG=.LA=MG=.LA=M5C=.LA=MA=.LA=MG= | 5829 | CATTTAGAGA |
| | 7071 | .LA=MA=.LT=M5C=MG | | CAAAGAATCG |
| 324 | CO- | M5C=MA=.LT=MT=.LT=MA=.LG=MA=.LG=MA=.L5C=MA=.LA=MA=.LG= | 5830 | CATTTAGAGA |
| | 7072 | MA=.LA=MT=M5C=MG | | CAAAGAATCG |
| 325 | CO- | M5C=MA=.LT=MT=MT=.LA=MG=MA=.LG=MA=M5C=.LA=MA=MA=.LG=MA=MA=.L | 5831 | CATTTAGAGA |
| | 7073 | T=M5C=MG | | CAAAGAATCG |
| 326 | CO- | M5C=MA=MT=MT=.LT=MA=MG=MA=.LG=MA=M5C=MA=.LA=MA=MG=MA=.LA=M | 5832 | CATTTAGAGA |
| | 7074 | T=M5C=MG | | CAAAGAATCG |
| 327 | CO- | M5C=MA=MT=.LT=MT=MA=MG=.LA=MG=MA=M5C=.LA=MA=MA=MG=.LA=MA=M | 5833 | CATTTAGAGA |
| | 7075 | T=M5C=MG | | CAAAGAATCG |
| 328 | CO- | M5C=MA=MT=MT=MT=.LA=MG=MA=MG=MA=.L5C=MA=MA=MA=MG=.LA=MA=M | 5834 | CATTTAGAGA |
| | 7076 | T=M5C=MG | | CAAAGAATCG |
| 329 | CO- | M5C=MA=MT=MT=.LT=MA=MG=MA=MG=.LA=M5C=MA=MA=MA=.LG=MA=MA=M | 5835 | CATTTAGAGA |
| | 7077 | T=M5C=MG | | CAAAGAATCG |
| 330 | CO- | MT=MG=MT=MT=MT=.LT=dG=d5C=.LT=dT=dG=.LG=dT=d5C=.LA=MA= | 5836 | TGTTTTGCTT |
| | 7078 | MG=MA=MG=MG | | GGTCAAGAGG |
| 331 | CO- | MT=MG=MT=.LT=MT=dT=dG=.L5C=dT=dT=dG=.LG=dT=d5C=dA= | 5837 | TGTTTTGCTT |
| | 7079 | .LA=MG=MA=MG=MG | | GGTCAAGAGG |
| 332 | CO- | MT=MG=MT=MT=.LT=dT=dG=d5C=.LT=dT=dG=dG=.LT=d5C=dA=MA= | 5838 | TGTTTTGCTT |
| | 7080 | .LG=MA=MG=MG | | GGTCAAGAGG |
| 333 | CO- | MT=MG=MT=.LT=MT=.LT=MG=.L5C=MT=.LT=MG=.LG=MT=.L5C=MA=.LA= | 5839 | TGTTTTGCTT |
| | 7081 | MG=.LA=MG=MG | | GGTCAAGAGG |
| 334 | CO- | MT=MG=.LT=MT=.LT=MT=.LG=M5C=.LT=MT=.LG=MG=.LT=M5C=.LA=MA= | 5840 | TGTTTTGCTT |
| | 7082 | .LG=MA=MG=MG | | GGTCAAGAGG |
| 335 | CO- | MT=MG=.LT=MT=MT=.LT=MG=M5C=.LT=MT=MG=.LG=MT=M5C=.LA=MA=MG=.LA | 5841 | TGTTTTGCTT |
| | 7083 | =MG=MG | | GGTCAAGAGG |
| 336 | CO- | MT=MG=MT=MT=.LT=MT=MG=M5C=.LT=MT=MG=MG=.LT=M5C=MA=MA=.LG=MA | 5842 | TGTTTTGCTT |
| | 7084 | =MG=MG | | GGTCAAGAGG |
| 337 | CO- | MT=MG=MT=.LT=MT=MT=MG=.L5C=MT=MT=MG=.LG-MT=M5C=MA=.LA=MG=MA | 5843 | TGTTTTGCTT |
| | 7085 | =MG=MG | | GGTCAAGAGG |
| 338 | CO- | MT=MG=MT=MT=MT=.LT=MG=M5C=MT=MT=.LG-MG-MT=M5C=MA=.LA=MG=MA | 5844 | TGTTTTGCTT |
| | 7086 | =MG=MG | | GGTCAAGAGG |
| 339 | CO- | MT=MG=MT=MT=.LT=MT=MG=M5C=MT=.LT=MG=MG=MT=M5C=.LA=MA=MG=MA | 5845 | TGTTTTGCTT |
| | 7087 | =MG=MG | | GGTCAAGAGG |
| 340 | CO- | MA=M5C=M5C=M5C=M5C=.L5C=d5C=dT=.L5C=dA=d5C=.L5C=dT=dT= | 5846 | ACCCCCCTCA |
| | 7088 | .LG=MG=MT=MT=M5C=M5C | | CCTTGGTTCC |
| 341 | CO- | MA=M5C=M5C=.L5C=M5C=d5C=d5C=.LT=d5C=dA=d5C=.L5C=dT=dT= | 5847 | ACCCCCCTCA |
| | 7089 | dG=.LG=MT=MT=M5C=M5C | | CCTTGGTTCC |
| 342 | CO- | MA=M5C=M5C=M5C=.L5C=d5C=d5C=dT=.L5C=dA=d5C=d5C=.LT=dT= | 5848 | ACCCCCCTCA |
| | 7090 | dG=MG=.LT=MT=M5C=M5C | | CCTTGGTTCC |
| 343 | CO- | MA=M5C=M5C=.L5C=M5C=.L5C=M5C=.LT=M5C=.LA=M5C=.L5C=MT= | 5849 | ACCCCCCTCA |
| | 7091 | .LT=MG=.LG=MT=.LT=M5C=M5C | | CCTTGGTTCC |
| 344 | CO- | MA=M5C=.L5C=M5C=.L5C=M5C=.L5C=MT=.L5C=MA=.L5C=M5C=.LT=MT= | 5850 | ACCCCCCTCA |
| | 7092 | .LG=MG=.LT=MT=M5C=M5C | | CCTTGGTTCC |
| 345 | CO- | MA=M5C=.L5C=M5C=M5C=.L5C=M5C=MT=.L5C=MA=M5C=.L5C=MT=MT= | 5851 | ACCCCCCTCA |
| | 7093 | .LG=MG=MT=.LT=M5C=M5C | | CCTTGGTTCC |
| 346 | CO- | MA=M5C=M5C=M5C=.L5C=M5C=M5C=MT=.L5C=MA=M5C-M5C=.LT=MT=MG=MG= | 5852 | ACCCCCCTCA |
| | 7094 | LT=MT=M5C=M5C | | CCTTGGTTCC |
| 347 | CO- | MA=M5C=M5C=.L5C=M5C=M5C=M5C=.LT=M5C=MA=M5C=.L5C=MT=MT=MG=.LG= | 5853 | ACCCCCCTCA |
| | 7095 | MT=MT=M5C=M5C | | CCTTGGTTCC |
| 348 | CO- | MA=M5C=M5C=M5C=M5C=.L5C=M5C=MT=M5C=MA=.L5C=M5C=MT=MT=MG=.LG= | 5854 | ACCCCCCTCA |
| | 7096 | MT=MT=M5C=M5C | | CCTTGGTTCC |
| 349 | CO- | MA=M5C=M5C=M5C=.L5C=M5C=M5C=MT=M5C=.LA=M5C=M5C=MT=MT=.LG=MG= | 5855 | ACCCCCCTCA |
| | 7097 | MT=MT=M5C=M5C | | CCTTGGTTCC |
| 350 | CO- | MA=MT=M5C-MT=MG=MG=dA=dA=dA=dA=dT=dA=dA=dT=dG=d5C=M5C=MT=MT= | 5856 | ATCTGGAAAA |
| | 7098 | MT=M5C=MT | | TAATGCCTTT |
| | | | | CT |
| 351 | CO- | MA=MT=M5C=MT=MG=MG=MA=MA=MA=MA=MT=MA=MA=MT=MG=M5C=M5C= | 5857 | ATCTGGAAAA |
| | 7099 | MT=MT=MT=M5C=MT | | TAATGCCTTT |
| | | | | CT |
| 352 | CO- | MA=MT=M5C=MT=MG=dG=dA=dA=MA=dA=dT=dA=dA=MT=dG=d5C=d5C=MT=MT= | 5858 | ATCTGGAAAA |
| | 7100 | MT=M5C=MT | | TAATGCCTTT |
| | | | | CT |
| 353 | CO- | MA=MT=M5C=MT=MG=.LG=dA=dA=.LA=dA=dT=dA=dA=.LT=dG=d5C= | 5859 | ATCTGGAAAA |
| | 7101 | .L5C=MT=MT=MT=M5C=MT | | TAATGCCTTT |
| | | | | CT |
| 354 | CO- | MT=MA=MT=M5C=MT=MG=MG=dA=dA=dA=dA=dT=dA=dA=dT=dG=d5C=M5C=MT= | 5860 | TATCTGGAAA |
| | 7102 | MT=MT=M5C=MT=MA | | ATAATGCCTT |
| | | | | TCTA |
| 355 | CO- | MT=MA=MT=M5C=MT=MG=MG=MA=MA=MA=MA=MT=MA=MA=MT=MG=M5C=M | 5861 | TATCTGGAAA |
| | 7103 | 5C=MT=MT=MT=M5C=MT=MA | | ATAATGCCTT |
| | | | | TCTA |
| 356 | CO- | MT=MA=MT=M5C=MT=dG=dG=MA=dA=dA=MA=dT=dA=MA=dT=dG=M5C=d5C=dT= | 5862 | TATCTGGAAA |
| | 7104 | MT=MT=M5C=MT=MA | | ATAATGCCTT |
| | | | | TCTA |
| 357 | CO- | MT=MA=MT=M5C=MT=dG=dG=.LA=dA=dA=.LA=dT=dA=.LA=dT=dG= | 5863 | TATCTGGAAA |
| | 7105 | .L5C=d5C=dT=MT=MT=M5C=MT=MA | | ATAATGCCTT |
| | | | | TCTA |
| 358 | CO- | MA=M5C=MA=MT=MT=MT=dA=dG=dA=dG=dA=d5C=dA=dA=dA=dG=MA=MA=MT= | 5864 | ACATTTAGAG |
| | 7106 | M5C=MG=M5C | | ACAAAGAATC |
| | | | | GC |
| 359 | CO- | MA=M5C=MA=MT=MT=MT=MA=MG=MA=MG=MA=M5C=MA=MA=MA=MG=MA=M | 5865 | ACATTTAGAG |
| | 7107 | A=MT=M5C=MG=M5C | | ACAAAGAATC |
| | | | | GC |
| 360 | CO- | MA=M5C=MA=MT=MT=dT=dA=dG=MA=dG=dA=d5C=dA=MA=dA=dG=dA=MA=MT= | 5866 | ACATTTAGAG |
| | 7108 | M5C=MG=M5C | | ACAAAGAATC |
| | | | | GC |
| 361 | CO- | MA=M5C=MA=MT=MT=.LT=dA=dG=.LA=dG=dA=d5C=dA=.LA=dA=dG=.LA= | 5867 | ACATTTAGAG |
| | 7109 | MA=MT=M5C=MG=M5C | | ACAAAGAATC |
| | | | | GC |
| 362 | CO- | MT=MA=M5C=MA=MT=MT=MT=dA=dG=dA=dG=dA=d5C=dA=dA=dA=dG=MA=MA= | 5868 | TACATTTAGA |
| | 7110 | MT=M5C=MG=M5C=MT | | GACAAAGAAT |
| | | | | CGCT |
| 363 | CO- | MT=MA=M5C=MA=MT=MT=MT=MA=MG=MA=MG=MA=M5C=MA-MA=MA=MG=M | 5869 | TACATTTAGA |
| | 7111 | A=MA=MT=M5C=MG=M5C=MT | | GACAAAGAAT |
| | | | | CGCT |
| 364 | CO- | MT=MA=M5C=MA=MT=dT=dT=MA=dG=dA=MG=dA=d5C=MA=dA=dA=MG=dA=dA= | 5870 | TACATTTAGA |
| | 7112 | MT=M5C=MG=M5C=MT | | GACAAAGAAT |
| | | | | CGCT |
| 365 | CO- | MT=MA=M5C=MA=MT=dT=dT=.LA=dG=dA=.LG=dA=d5C=.LA=dA=dA= | 5871 | TACATTTAGA |
| | 7113 | .LG-dA=dA=MT=M5C=MG=M5C=MT | | GACAAAGAAT |
| | | | | CGCT |
| 366 | CO- | MG=MT=MG=MT=MT=MT=dT=dG=d5C=dT=dT=dG=dG=dT=d5C=dA=MA=MG= | 5872 | GTGTTTTGCT |
| | 7114 | MA=MG=MG=MA | | TGGTCAAGAG |
| | | | | GA |
| 367 | CO- | MG=MT=MG=MT=MT=MT=MT=MG=M5C=MT=MT=MG=MG=MT=M5C=MA=MA=M | 5873 | GTGTTTTGCT |
| | 7115 | G=MA=MG=MG=MA | | TGGTCAAGAG |
| | | | | GA |
| 368 | CO- | MG=MT=MG=MT=MT=dT=dT=dG=M5C=dT=dT=dG=dG=MT=d5C=dA=dA=MG= | 5874 | GTGTTTTGCT |
| | 7116 | MA=MG=MG=MA | | TGGTCAAGAG |
| | | | | GA |
| 369 | CO- | MG=MT=MG=MT=MT=.LT=dT=dG=.L5C=dT=dT=dG=dG=.LT=d5C=dA | 5875 | GTGTTTTGCT |
| | 7117 | =.LA=MG=MA=MG=MG=MA | | TGGTCAAGAG |
| | | | | GA |
| 370 | CO- | MT=MG=MT=MG=MT=MT=MT=dT=dG=d5C=dT=dT=dG=dG=dT=d5C=dA=MA= | 5876 | TGTGTTTTGC |
| | 7118 | MG=MA=MG=MG=MA=MA | | TTGGTCAAGA |
| | | | | GGAA |
| 371 | CO- | MT=MG=MT=MG=MT=MT=MT=MT=MG=M5C=MT=MT=MG=MG=MT=M5C=MA=MA | 5877 | TGTGTTTTGC |
| | 7119 | =MG=MA=MG=MG=MA=MA | | TTGGTCAAGA |
| | | | | GGAA |
| 372 | CO- | MT=MG=MT=MG=MT=dT=dT=MT=dG=d5C=MT=dT=dG=MG=dT=d5C=MA=dA= | 5878 | TGTGTTTTGC |
| | 7120 | dG=MA=MG=MG=MA=MA | | TTGGTCAAGA |
| | | | | GGAA |
| 373 | CO- | MT=MG=MT=MG=MT=dT=dT=.LT=dG=d5C=.LT=dT=dG=.LG=dT=d5C= | 5879 | TGTGTTTTGC |
| | 7121 | .LA=dA=dG=MA=MG=MG=MA=MA | | TTGGTCAAGA |
| | | | | GGAA |
| 374 | CO- | M5C=MA=M5C=M5C=M5C=M5C=d5C=d5C=dT=d5C=dA=d5C=d5C=dT=dT= | 5880 | CACCCCCCTC |
| | 7122 | dG=MG=MT=MT=M5C=M5C=M5C | | ACCTTGGTTC |
| | | | | CC |
| 375 | CO- | M5C=MA=M5C=M5C=M5C=M5C=M5C=M5C=MT=M5C=MA=M5C=M5C=MT=MT= | 5881 | CACCCCCCTC |
| | 7123 | MG=MG=MT=MT=M5C=M5C=M5C | | ACCTTGGTTC |
| | | | | CC |
| 376 | CO- | M5C=MA=M5C=M5C=M5C=d5C=d5C=d5C=MT=d5C=dA=d5C=d5C=MT= | 5882 | CACCCCCCTC |
| | 7124 | dT=dG=dG=MT=MT=M5C=M5C=M5C | | ACCTTGGTTC |
| | | | | CC |
| 377 | CO- | M5C=MA=M5C=M5C=M5C=.L5C=d5C=d5C=.LT=d5C=dA=d5C=d5C= | 5883 | CACCCCCCTC |
| | 7125 | .LT=dT=dG=.LG=MT=MT=M5C=M5C=M5C | | ACCTTGGTTC |
| | | | | CC |
| 378 | CO- | MT=M5C=MA=M5C=M5C=M5C=M5C=d5C=d5C=dT=d5C=dA=d5C=d5C=dT= | 5884 | TCACCCCCCT |
| | 7126 | dT=dG=MG=MT=MT=M5C=M5C=M5C=M5C | | CACCTTGGTT |
| | | | | CCCC |
| 379 | CO- | MT=M5C=MA=M5C=M5C=M5C=M5C=M5C=M5C=MT=M5C=MA=M5C=M5C=MT= | 5885 | TCACCCCCCT |
| | 7127 | MT=MG=MG=MT=MT=M5C=M5C=M5C=M5C | | CACCTTGGTT |
| | | | | CCCC |
| 380 | CO- | MT=M5C=MA=M5C=M5C=d5C=d5C=M5C=d5C=dT=M5C=dA=d5C=M5C=dT= | 5886 | TCACCCCCCT |
| | 7128 | dT=MG=dG=dT=MT=M5C=M5C=M5C=M5C | | CACCTTGGTT |
| | | | | CCCC |
| 381 | CO- | MT=M5C=MA=M5C=M5C=d5C=d5C=.L5C=d5C=dT=.L5C=dA=d5C=.L5C= | 5887 | TCACCCCCCT |
| | 7129 | dT=dT=.LG=dG=dT=MT=M5C=M5C=M5C=M5C | | CACCTTGGTT |
| | | | | CCCC |
| 382 | CO- | MT=MT=MA=MG=MG=MA=MG=MG=MA=MT=MT=MA=MT=MT=MT=MA=MA=M5C | 5888 | TTAGGAGGAT |
| | 7130 | =M5C=MT | | TATTTAACCT |
| 383 | CO- | M5C=MT=MT=MA=MG=dG=dA=dG=dG=dA=dT=dT=dA=dT=dT=MT=MA=MA= | 5889 | CTTAGGAGGA |
| | 7131 | M5C=M5C | | TTATTTAACC |
| 384 | CO- | M5C=M5C=MT=MT=MA=MG=MG=MA=MG=MG=MA=MT=MT=MA=MT=MT=MT=M | 5890 | CCTTAGGAGG |
| | 7132 | A=MA=M5C | | ATTATTTAAC |
| 385 | CO- | MA=M5C=MA=M5C=M5C=MT=MT=MA=MG=MG=MA=MG=MG=MA=MT=MT=MA= | 5891 | ACACCTTAGG |
| | 7133 | MT=MT=MT | | AGGATTATTT |
| 386 | CO- | MT=MT=MA=M5C=MA=M5C=M5C=MT=MT=MA=MG=MG=MA=MG=MG=MA=MT= | 5892 | TTACACCTTA |
| | 7134 | MT=MA=MT | | GGAGGATTAT |
| 387 | CO- | MT=MG=MT=MT=MA=M5C=MA=M5C=M5C=MT=MT=MA=MG=MG=MA=MG=MG= | 5893 | TGTTACACCT |
| | 7135 | MA=MT=MT | | TAGGAGGATT |
| 388 | CO- | MT=MA=MG=MT=MT=MG=MT=MT=MA=M5C=MA=M5C=M5C=MT=MT=MA=MG=M | 5894 | TAGTTGTTAC |
| | 7136 | G=MA=MG | | ACCTTAGGAG |
| 389 | CO- | MA=M5C=MT=MA=MG=MT=MT=MG=MT=MT=MA=M5C=MA=M5C=M5C=MT=MT= | 5895 | ACTAGTTGTT |
| | 7137 | MA=MG=MG | | ACACCTTAGG |
| 390 | CO- | M5C=MT=MT=MA=MG=.LG=dA=dG=.LG=dA=dT=.LT=dA=dT=.LT=MT=MA= | 5896 | CTTAGGAGGA |
| | 7138 | MA=M5C=M5C | | TTATTTAACC |
| 391 | CO- | M5C=MT=MT=.LA=MG=dG=dA=.LG=dG=dA=dT=.LT=dA=dT=dT=.LT=MA= | 5897 | CTTAGGAGGA |
| | 7139 | MA=M5C=M5C | | TTATTTAACC |
| 392 | CO- | M5C=MT=MT=MA=.LG=dG=dA=dG=.LG=dA=dT=dT=.LA=dT=dT=MT=.LA= | 5898 | CTTAGGAGGA |
| | 7140 | MA=M5C=M5C | | TTATTTAACC |
| 393 | CO- | M5C=MT=MT=.LA=MG=.LG=MA=.LG=MG=.LA=MT=.LT=MA=.LT=MT=.LT= | 5899 | CTTAGGAGGA |
| | 7141 | MA=.LA=M5C=M5C | | TTATTTAACC |
| 394 | CO- | M5C=MT=.LT=MA=.LG=MG=.LA=MG=.LG=MA=.LT=MT=.LA=MT=.LT=MT= | 5900 | CTTAGGAGGA |
| | 7142 | .LA=MA=M5C=M5C | | TTATTTAACC |
| 395 | CO- | M5C=MT=.LT=MA=MG=.LG-MA=MG=.LG=MA=MT=.LT=MA=MT=.LT=MT=MA= | 5901 | CTTAGGAGGA |
| | 7143 | .LA=M5C=M5C | | TTATTTAACC |
| 396 | CO- | M5C=MT=MT=MA=.LG=MG=MA=MG=.LG=MA=MT=MT=.LA=MT=MT=MT=.LA=MA | 5902 | CTTAGGAGGA |
| | 7144 | =M5C=M5C | | TTATTTAACC |
| 397 | CO- | M5C=MT=MT=.LA=MG=MG=MA=.LG=MG=MA=MT=.LT=MA=MT=MT=.LT=MA=MA | 5903 | CTTAGGAGGA |
| | 7145 | =M5C=M5C | | TTATTTAACC |
| 398 | CO- | M5C=MT=MT=MA=MG=.LG=MA=MG=MG=MA=.LT=MT=MA=MT=MT=.LT=MA=MA | 5904 | CTTAGGAGGA |
| | 7146 | =M5C=M5C | | TTATTTAACC |
| 399 | CO- | M5C=MT=MT=MA=.LG=MG=MA=MG=MG=.LA=MT=MT=MA=MT=.LT=MT=MA=MA | 5905 | CTTAGGAGGA |
| | 7147 | =M5C=M5C | | TTATTTAACC |
| 400 | CO- | M5C=M5C=MT=MT=MA=MG=dG=dA=dG=dG=dA=dT=dT=dA=dT=dT=MT=MA= | 5906 | CCTTAGGAGG |
| | 7148 | MA=M5C=M5C=MT | | ATTATTTAAC |
| | | | | CT |
| 401 | CO- | M5C=M5C=MT=MT=MA=MG=MG=MA=MG=MG=MA=MT=MT=MA=MT=MT=MT=M | 5907 | CCTTAGGAGG |
| | 7149 | A=MA=M5C=M5C=MT | | ATTATTTAAC |
| | | | | CT |
| 402 | CO- | M5C=M5C=MT=MT=MA=dG=dG=dA=MG=dG=dA=dT=dT=MA=dT=dT=dT=MA= | 5908 | CCTTAGGAGG |
| | 7150 | MA=M5C=M5C=MT | | ATTATTTAAC |
| | | | | CT |
| 403 | CO- | M5C=M5C=MT=MT=MA=.LG=dG=dA=.LG=dG=dA=dT=dT=.LA=dT=dT= | 5909 | CCTTAGGAGG |
| | 7151 | .LT=MA=MA=M5C=M5C=MT | | ATTATTTAAC |
| | | | | CT |
| 404 | CO- | MA=M5C=M5C=MT=MT=MA=MG=dG=dA=dG=dG=dA=dT=dT=dA=dT=dT= | 5910 | ACCTTAGGAG |
| | 7152 | MT=MA=MA=M5C=M5C=MT=M5C | | GATTATTTAA |
| | | | | CCTC |
| 405 | CO- | MA=M5C=M5C=MT=MT=MA=MG=MG=MA=MG=MG=MA=MT=MT=MA=MT=MT=M | 5911 | ACCTTAGGAG |
| | 7153 | T=MA=MA=M5C=M5C=MT=M5C | | GATTATTTAA |
| | | | | CCTC |
| 406 | CO- | MA=M5C=M5C=MT=MT=dA=dG=MG=dA=dG=MG=dA=dT=MT=dA=dT=MT= | 5912 | ACCTTAGGAG |
| | 7154 | dT=dA=MA=M5C=M5C=MT=M5C | | GATTATTTAA |
| | | | | CCTC |
| 407 | CO- | MA=M5C=M5C=MT=MT=dA=dG=.LG=dA=dG=.LG=dA=dT=.LT=dA=dT= | 5913 | ACCTTAGGAG |
| | 7155 | .LT=dT=dA=MA=M5C=M5C=MT=M5C | | GATTATTTAA |
| | | | | CCTC |
| 408 | CO- | MG=MG=MA=MG=M5C=MA=MA=MA=M5C=MT=MA=MG=MG=M5C=MA=M5C=MT | 5914 | GGAGCAAACT |
| | 7156 | =MG=MA=MG | | AGGCACTGAG |
| 409 | CO- | MG=MT=MG=MG=MA=dG=d5C=dA=dA=dA=d5C=dT=dA=dG=dG=M5C=MA= | 5915 | GTGGAGCAAA |
| | 7157 | M5C=MT=MG | | CTAGGCACTG |
| 410 | CO- | MA=MG=MG=MT=MG=MG=MA=MG=M5C=MA=MA=MA=M5C=MT=MA=MG=MG= | 5916 | AGGTGGAGCA |
| | 7158 | M5C=MA=M5C | | AACTAGGCAC |
| 411 | CO- | MG=MG=MA=MG=MG=MT=MG=MG=MA=MG=M5C=MA=MA=MA=M5C=MT=MA= | 5917 | GGAGGTGGAG |
| | 7159 | MG=MG=M5C | | CAAACTAGGC |
| 412 | CO- | MT=MG=MT=MG=MG=MA=MG=MG=MT=MG=MG=MA=MG=M5C=MA=MA=MA=M5 | 5918 | TGTGGAGGTG |
| | 7160 | C=MT=MA | | GAGCAAACTA |
| 413 | CO- | MG=MA=MT=MG=MT=MG=MG=MA=MG=MG=MT=MG=MG=MA=MG=M5C=MA=M | 5919 | GATGTGGAGG |
| | 7161 | A=MA=M5C | | TGGAGCAAAC |
| 414 | CO- | MA=MT=MG=MA=MT=MG=MT=MG=MG=MA=MG=MG=MT=MG=MG=MA=MG=M5 | 5920 | ATGATGTGGA |
| | 7162 | C=MA=MA | | GGTGGAGCAA |
| 415 | CO- | M5C=MA=MG=MA=M5C=MA=MT=MG=MA=MT=MG=MT=MG=MG=MA=MG=MG=M | 5921 | CAGACATGAT |
| | 7163 | T=MG=MG | | GTGGAGGTGG |
| 416 | CO- | MA=MT=MT=M5C=MT=MA=M5C=MA=MG=MA=MG=MG=MG=MA=MG=M5C=MA= | 5922 | ATTCTACAGA |
| | 7164 | MT=MA=MA | | GGGAGCATAA |
| 417 | CO- | MT=MT=MA=MA=MT=MT=M5C=MT=MA=M5C=MA=MG=MA=MG=MG=MG=MA=M | 5923 | TTAATTCTAC |
| | 7165 | G=M5C=MA | | AGAGGGAGCA |
| 418 | CO- | MG=MT=MT=MA=MT=MT=MA=MA=MT=MT=M5C=MT=MA=M5C=MA=MG=MA=M | 5924 | GTTATTAATT |
| | 7166 | G=MG=MG | | CTACAGAGGG |
| 419 | CO- | MG=MG=M5C=MG=MT=MT=MA=MT=MT=MA=MA=MT=MT=M5C=MT=MA=M5C=M | 5925 | GGCGTTATTA |
| | 7167 | A=MG=MA | | ATTCTACAGA |
| 420 | CO- | MT=MG=MG=M5C=MG=dT=dT=dA=dT=dT=dA=dA=dT=dT=d5C=MT=MA=M5C | 5926 | TGGCGTTATT |
| | 7168 | =MA=MG | | AATTCTACAG |
| 421 | CO- | MT=MT=MA=MT=MT=MT=MG=MG=M5C=MG=MT=MT=MA=MT=MT=MA=MA=MT= | 5927 | TTATTTGGCG |
| | 7169 | MT=M5C | | TTATTAATTC |
| 422 | CO- | MT=M5C=MT=MT=MA=MT=MT=MT=MG=MG=M5C=MG=MT=MT=MA=MT=MT=MA | 5928 | TCTTATTTGG |
| | 7170 | =MA=MT | | CGTTATTAAT |
| 423 | CO- | MA=MG=MT=M5C=MT=MT=MA=MT=MT=MT=MG=MG=M5C=MG=MT=MT=MA=MT | 5929 | AGTCTTATTT |
| | 7171 | =MT=MA | | GGCGTTATTA |
| 424 | CO- | MT=MT=MA=MG=MT=M5C=MT=MT=MA=MT=MT=MT=MG=MG=M5C=MG=MT=MT | 5930 | TTAGTCTTAT |
| | 7172 | =MA=MT | | TTGGCGTTAT |
| 425 | CO- | MA=MA=MT=MT=MA=MG=MT=M5C=MT=MT=MA=MT=MT=MT=MG=MG=M5C=M | 5931 | AATTAGTCTT |
| | 7173 | G=MT=MT | | ATTTGGCGTT |
| 426 | CO- | MT=MG=MT=MA=MA-MT=MT=MA=MG=MT=M5C=MT=MT=MA=MT=MT=MT=MG= | 5932 | TGTAATTAGT |
| | 7174 | MG=M5C | | CTTATTTGGC |
| 427 | CO- | MG=MT=MG=MG=MA=.LG=d5C=dA=.LA=dA=d5C=.LT=dA=dG=.LG=M5C= | 5933 | GTGGAGCAAA |
| | 7175 | MA=M5C=MT=MG | | CTAGGCACTG |
| 428 | CO- | MG=MT=MG=.LG=MA=dG=d5C=.LA=dA=dA=d5C=.LT=dA=dG=dG=.L5C= | 5934 | GTGGAGCAAA |
| | 7176 | MA=M5C=MT=MG | | CTAGGCACTG |
| 429 | CO- | MG=MT=MG=MG=.LA=dG=d5C=dA=.LA=dA=d5C=dT=.LA=dG=dG=M5C= | 5935 | GTGGAGCAAA |
| | 7177 | .LA=M5C=MT=MG | | CTAGGCACTG |
| 430 | CO- | MG=MT=MG=.LG=MA=.LG=M5C=.LA=MA=.LA=M5C=.LT=MA=.LG=MG= | 5936 | GTGGAGCAAA |
| | 7178 | .L5C=MA=.L5C=MT=MG | | CTAGGCACTG |
| 431 | CO- | MG=MT=.LG=MG=.LA=MG=.L5C=MA=.LA=MA=.L5C=MT=.LA=MG=.LG= | 5937 | GTGGAGCAAA |
| | 7179 | M5C=.LA=M5C=MT=MG | | CTAGGCACTG |
| 432 | CO- | MG=MT=.LG=MG=MA=.LG=M5C=MA=.LA=MA=M5C=.LT=MA=MG=.LG=M5C=MA=. | 5938 | GTGGAGCAAA |
| | 7180 | L5C=MT=MG | | CTAGGCACTG |
| 433 | CO- | MG=MT=MG=MG=.LA=MG=M5C=MA=.LA=MA=M5C=MT=.LA=MG=MG=M5C=.LA= | 5939 | GTGGAGCAAA |
| | 7181 | M5C=MT=MG | | CTAGGCACTG |
| 434 | CO- | MG=MT=MG=.LG=MA=MG=M5C=.LA=MA=MA=M5C=.LT=MA=MG=MG=.L5C=MA= | 5940 | GTGGAGCAAA |
| | 7182 | M5C=MT=MG | | CTAGGCACTG |
| 435 | CO- | MG=MT=MG=MG=MA=.LG=M5C=MA=MA=MA=.L5C=MT=MA=MG=MG=.L5C=MA= | 5941 | GTGGAGCAAA |
| | 7183 | M5C=MT=MG | | CTAGGCACTG |
| 436 | CO- | MG=MT=MG=MG=.LA=MG=M5C=MA=MA=.LA=M5C=MT=MA=MG=.LG=M5C=MA= | 5942 | GTGGAGCAAA |
| | 7184 | M5C=MT=MG | | CTAGGCACTG |
| 437 | CO- | MT=MG=MG=M5C=MG=.LT=dT=dA=.LT=dT=dA=.LA=dT=dT=.L5C=MT=MA= | 5943 | TGGCGTTATT |
| | 7185 | M5C=MA=MG | | AATTCTACAG |
| 438 | CO- | MT=MG=MG=.L5C=MG=dT=dT=.LA=dT=dT=dA=.LA=dT=dT=d5C=.LT=MA= | 5944 | TGGCGTTATT |
| | 7186 | M5C=MA=MG | | AATTCTACAG |
| 439 | CO- | MT=MG=MG=M5C=.LG=dT=dT=dA=.LT=dT=dA=dA=.LT=dT=d5C=MT= | 5945 | TGGCGTTATT |
| | 7187 | .LA=M5C=MA=MG | | AATTCTACAG |
| 440 | CO- | MT=MG=MG=.L5C=MG=.LT=MT=.LA=MT=.LT=MA=.LA=MT=.LT=M5C=.LT= | 5946 | TGGCGTTATT |
| | 7188 | MA=.L5C=MA=MG | | AATTCTACAG |
| 441 | CO- | MT=MG=.LG=M5C=.LG=MT=.LT=MA=.LT=MT=.LA=MA=.LT=MT=.L5C=MT= | 5947 | TGGCGTTATT |
| | 7189 | .LA=M5C=MA=MG | | AATTCTACAG |
| 442 | CO- | MT=MG=.LG=M5C=MG=.LT=MT=MA=.LT=MT=MA=.LA=MT=MT=.L5C=MT=MA= | 5948 | TGGCGTTATT |
| | 7190 | .L5C=MA=MG | | AATTCTACAG |
| 443 | CO- | MT=MG=MG=M5C=.LG=MT=MT=MA=.LT=MT=MA=MA=.LT=MT=M5C=MT=.LA=M5 | 5949 | TGGCGTTATT |
| | 7191 | C=MA=MG | | AATTCTACAG |
| 444 | CO- | MT=MG=MG=.L5C=MG=MT=MT=.LA=MT=MT=MA=.LA=MT=MT=M5C=.LT=MA=M5 | 5950 | TGGCGTTATT |
| | 7192 | C=MA=MG | | AATTCTACAG |
| 445 | CO- | MT=MG=MG=M5C=MG=.LT=MT=MA=MT=MT=.LA=MA=MT=MT=M5C=.LT=MA=M5 | 5951 | TGGCGTTATT |
| | 7193 | C=MA=MG | | AATTCTACAG |
| 446 | CO- | MT=MG=MG=M5C=.LG=MT=MT=MA=MT=.LT=MA=MA=MT=MT=.L5C=MT=MA=M5 | 5952 | TGGCGTTATT |
| | 7194 | C=MA=MG | | AATTCTACAG |
| 447 | CO- | MG=MG=MT=MG=MG=MA=dG=d5C=dA=dA=dA=d5C=dT=dA=dG=dG=M5C=MA= | 5953 | GGTGGAGCAA |
| | 7195 | M5C=MT=MG=MA | | ACTAGGCACT |
| | | | | GA |
| 448 | CO- | MG=MG=MT=MG=MG=MA=MG=M5C=MA=MA=MA=M5C=MT=MA=MG=MG=M5C= | 5954 | GGTGGAGCAA |
| | 7196 | MA=M5C=MT=MG=MA | | ACTAGGCACT |
| | | | | GA |
| 449 | CO- | MG=MG=MT=MG=MG=dA=dG=d5C=MA=dA=dA=d5C=dT=MA=dG=dG=d5C=MA= | 5955 | GGTGGAGCAA |
| | 7197 | M5C=MT=MG=MA | | ACTAGGCACT |
| | | | | GA |
| 450 | CO- | MG=MG=MT=MG=MG=.LA=dG=d5C=.LA=dA=dA=d5C=dT=.LA=dG=dG=.L5C= | 5956 | GGTGGAGCAA |
| | 7198 | MA=M5C=MT=MG=MA | | ACTAGGCACT |
| | | | | GA |
| 451 | CO- | MA=MG=MG=MT=MG=MG=MA=dG=d5C=dA=dA=dA=d5C=dT=dA=dG=dG=M5C=MA | 5957 | AGGTGGAGCA |
| | 7199 | =M5C=MT=MG=MA=MG | | AACTAGGCAC |
| | | | | TGAG |
| 452 | CO- | MA=MG=MG=MT=MG=MG=MA=MG=M5C=MA=MA=MA=M5C=MT=MA=MG=MG= | 5958 | AGGTGGAGCA |
| | 7200 | M5C=MA=M5C=MT=MG=MA=MG | | AACTAGGCAC |
| | | | | TGAG |
| 453 | CO- | MA=MG=MG=MT=MG=dG=dA=MG=d5C=dA=MA=dA=d5C=MT=dA=dG=MG=d5C= | 5959 | AGGTGGAGCA |
| | 7201 | dA=M5C=MT=MG=MA=MG | | AACTAGGCAC |
| | | | | TGAG |
| 454 | CO- | MA=MG=MG=MT=MG=dG=dA=.LG=d5C=dA=.LA=dA=d5C=.LT=dA=dG=. | 5960 | AGGTGGAGCA |
| | 7202 | LG=d5C=dA=M5C=MT=MG=MA=MG | | AACTAGGCAC |
| | | | | TGAG |
| 455 | CO- | MT=MT=MG=MG=M5C=MG=dT=dT=dA=dT=dT=dA=dA=dT=dT=d5C=MT=MA=M5C= | 5961 | TTGGCGTTAT |
| | 7203 | MA=MG=MA | | TAATTCTACA |
| | | | | GA |
| 456 | CO- | MT=MT=MG=MG=M5C=MG=MT=MT=MA=MT=MT=MA=MA=MT=MT=M5C=MT=MA | 5962 | TTGGCGTTAT |
| | 7204 | =M5C=MA=MG=MA | | TAATTCTACA |
| | | | | GA |
| 457 | CO- | MT=MT=MG=MG=M5C=dG=dT=dT=MA=dT=dT=dA=dA=MT=dT=d5C=dT=MA=M5C= | 5963 | TTGGCGTTAT |
| | 7205 | MA=MG=MA | | TAATTCTACA |
| | | | | GA |
| 458 | CO- | MT=MT=MG=MG=M5C=.LG=dT=dT=.LA=dT=dT=dA=dA=.LT=dT=d5C=.LT= | 5964 | TTGGCGTTAT |
| | 7206 | MA=M5C=MA=MG=MA | | TAATTCTACA |
| | | | | GA |
| 459 | CO- | MT=MT=MT=MG=MG=M5C=MG=dT=dT=dA=dT=dT=dA=dA=dT=dT=d5C=MT= | 5965 | TTTGGCGTTA |
| | 7207 | MA=M5C=MA=MG=MA=MG | | TTAATTCTAC |
| | | | | AGAG |
| 460 | CO- | MT=MT=MT=MG=MG=M5C=MG=MT=MT=MA=MT=MT=MA=MA=MT=MT=M5C=MT | 5966 | TTTGGCGTTA |
| | 7208 | =MA=M5C=MA=MG=MA=MG | | TTAATTCTAC |
| | | | | AGAG |
| 461 | CO- | MT=MT=MT=MG=MG=d5C=dG=MT=dT=dA=MT=dT=dA=MA=dT=dT=M5C=dT= | 5967 | TTTGGCGTTA |
| | 7209 | dA=M5C=MA=MG=MA=MG | | TTAATTCTAC |
| | | | | AGAG |
| 462 | CO- | MT=MT=MT=MG=MG=d5C=dG=.LT=dT=dA=.LT=dT=dA=.LA=dT=dT= | 5968 | TTTGGCGTTA |
| | 7210 | .L5C=dT=dA=M5C=MA=MG=MA=MG | | TTAATTCTAC |
| | | | | AGAG |
| 463 | CO- | MT=MG=MT=MT=MT=MT=MG=M5C=MT=MT=MG=MG=MT=M5C=MA=MA=MG=M | 5969 | TGTTTTGCTT |
| | 7378 | A=MG=MG-.[TEG] | | GGTCAAGAGG |
| 464 | CO- | MT=MG=MG=M5C=MG-MT=MT=MA=MT=MT=MA=MA=MT=MT=M5C=MT=MA=M5 | 5970 | TGGCGTTATT |
| | 7379 | C=MA=MG-.[TEG] | | AATTCTACAG |
| 465 | CO- | MA=M5C=M5C=MT=MT=MT=MT=M5C=M5C=MA=MA=M5C=M5C=MT=M5C=MG=M | | |
| | 10800 | G=MT=MT=MT | | |
| 466 | CO- | MT=MG=MG=MT=MG=MT=MT=MA=MT=MT=MA=MA=MT=MT=M5C=MT=MA=M5C | | |
| | 10831 | =MA=MG | | |
| 467 | CO- | MT=MG=MT-MT=MT=MT-MG=M5C=MT-MT=MG=MG-MT=M5C=MA-MA=MG=MA- | | |
| | 11207 | MG=MG | | |
| 468 | CO- | MT=MG=MT-MT=MT-MT=MG-M5C=MT-MT=MG-MG=MT-M5C=MA-MA=MG- | | |
| | 11208 | MA=MG=MG | | |
| 469 | CO- | MT=MG=MT=MT=MT-MT-MG=M5C=MT=MT=MG=MG=MT=M5C-MA- | 5971 | TGTTTTGCTT |
| | 11198 | MA=MG=MA=MG=MG | | GGTCAAGAGG |
| 470 | CO- | MT=MG=MT=MT-MT-MT-MG=M5C=MT=MT=MG=MG=MT=M5C-MA-MA- | 5972 | TGTTTTGCTT |
| | 11199 | MG=MA=MG=MG | | GGTCAAGAGG |
| 471 | CO- | MT=MG=MT-MT-MT-MT-MG=M5C=MT=MT=MG=MG=MT=M5C-MA-MA-MG- | 5973 | TGTTTTGCTT |
| | 11200 | MA=MG=MG | | GGTCAAGAGG |
| 472 | CO- | MT=MG-MT-MT-MT-MT-MG=M5C=MT=MT=MG=MG=MT=M5C-MA-MA-MG-MA- | 5974 | TGTTTTGCTT |
| | 11201 | MG=MG | | GGTCAAGAGG |
| 473 | CO- | MT=MG=MT-MT=MT=MT=MG=M5C-MT=MT=MG=MG=MT-M5C=MA=MA=MG=MA- | 5975 | TGTTTTGCTT |
| | 11202 | MG=MG | | GGTCAAGAGG |
| 474 | CO- | MT=MG=MT=MT-MT=MT=MG=M5C-MT=MT=MG=MG-MT=M5C=MA=MA- | 5976 | TGTTTTGCTT |
| | 11203 | MG=MA=MG=MG | | GGTCAAGAGG |
| 475 | CO- | MT=MG=MT=MT=MT-MT=MG=M5C=MT-MT=MG=MG=MT-M5C=MA=MA=MG- | 5977 | TGTTTTGCTT |
| | 11204 | MA=MG=MG | | GGTCAAGAGG |
| 476 | CO- | MT=MG-MT=MT=MT=MT-MG=M5C=MT=MT-MG=MG=MT=M5C-MA=MA=MG=MA- | 5978 | TGTTTTGCTT |
| | 11205 | MG=MG | | GGTCAAGAGG |
| 477 | CO- | MT=MG-MT=MT=MT-MT=MG=M5C-MT=MT=MG-MG=MT=M5C-MA=MA=MG- | 5979 | TGTTTTGCTT |
| | 11206 | MA=MG=MG | | GGTCAAGAGG |
| 478 | CO- | MT=MG-MT=MT-MT=MT-MG=M5C-MT=MT-MG=MG-MT=M5C-MA=MA-MG=MA- | 5980 | TGTTTTGCTT |
| | 11209 | MG=MG | | GGTCAAGAGG |
| 479 | CO- | MG=MT=.LG=MG=.LA-MG-.L5C=MA=.LA=MA=.L5C=MT=.LA=MG-.LG- | 5981 | GTGGAGCAAA |
| | 11210 | M5C=.LA=M5C=MT=MG | | CTAGGCACTG |
| 480 | CO- | MG=MT=.LG=MG-.LA-MG-.L5C=MA=.LA=MA=.L5C=MT=.LA=MG-.LG-M5C- | 5982 | GTGGAGCAAA |
| | 11211 | .LA=M5C=MT=MG | | CTAGGCACTG |
| 481 | CO- | MG=MT=.LG-MG-.LA-MG-.L5C=MA=.LA=MA=.L5C=MT=.LA=MG-.LG- | 5983 | GTGGAGCAAA |
| | 11212 | M5C-.LA-M5C=MT=MG | | CTAGGCACTG |
| 482 | CO- | MG=MT-.LG-MG-.LA-MG-.L5C=MA=.LA=MA=.L5C=MT=.LA=MG-.LG-M5C- | 5984 | GTGGAGCAAA |
| | 11213 | .LA-M5C-MT=MG | | CTAGGCACTG |
| 483 | CO- | MG=MT=.LG-MG=.LA=MG=.L5C=MA-.LA=MA=.L5C=MT=.LA- | 5985 | GTGGAGCAAA |
| | 11214 | MG=.LG=M5C=.LA=M5C-MT=MG | | CTAGGCACTG |
| 484 | CO- | MG=MT=.LG=MG-.LA=MG=.L5C=MA-.LA=MA=.L5C=MT-.LA=MG=.LG=M5C- | 5986 | GTGGAGCAAA |
| | 11215 | .LA=M5C=MT=MG | | CTAGGCACTG |
| 485 | CO- | MG=MT=.LG=MG=.LA-MG=.L5C=MA=.LA-MA=.L5C=MT=.LA-MG=.LG=M5C= | 5987 | GTGGAGCAAA |
| | 11216 | .LA-M5C=MT=MG | | CTAGGCACTG |
| 486 | CO- | MG=MT-.LG=MG=.LA=MG-.L5C=MA=.LA=MA-.L5C-MT=.LA=MG- | 5988 | GTGGAGCAAA |
| | 11217 | LG=M5C=.LA=M5C-MT=MG | | CTAGGCACTG |
| 487 | CO- | MG=MT-.LG=MG=.LA-MG=.L5C=MA-.LA=MA=.L5C-MT=.LA=MG-.LG=M5C= | 5989 | GTGGAGCAAA |
| | 11218 | .LA-M5C=MT=MG | | CTAGGCACTG |
| 488 | CO- | MG=MT=.LG-MG=.LA=MG-.L5C=MA=.LA-MA=.L5C=MT-.LA=MG=.LG- | 5990 | GTGGAGCAAA |
| | 11219 | M5C=.LA=M5C-MT=MG | | CTAGGCACTG |
| 489 | CO- | MG=MT=.LG-MG=.LA-MG=.L5C-MA=.LA-MA=.L5C-MT=.LA-MG=.LG-M5C= | 5991 | GTGGAGCAAA |
| | 11220 | .LA-M5C=MT=MG | | CTAGGCACTG |
| 490 | CO- | MG=MT-.LG=MG-.LA=MG-.L5C=MA-.LA=MA-.L5C=MT-.LA=MG-.LG= | 5992 | GTGGAGCAAA |
| | 11221 | M5C-.LA=M5C-MT=MG | | CTAGGCACTG |
| 491 | CO- | MG=MT=.LG=MG=MA-.LG-M5C=MA=.LA=MA=M5C=.LT=MA=MG-.LG- | 5993 | GTGGAGCAAA |
| | 11222 | M5C=MA=.L5C=MT=MG | | CTAGGCACTG |
| 492 | CO- | MG=MT=.LG=MG-MA-.LG-M5C=MA=.LA=MA=M5C=.LT=MA=MG-.LG-M5C- | 5994 | GTGGAGCAAA |
| | 11223 | MA=.L5C=MT=MG | | CTAGGCACTG |
| 493 | CO- | MG=MT=.LG-MG-MA-.LG-M5C=MA=.LA=MA=M5C=.LT=MA=MG-.LG-M5C-MA- | 5995 | GTGGAGCAAA |
| | 11224 | L5C=MT=MG | | CTAGGCACTG |
| 494 | CO- | MG=MT-.LG-MG-MA-.LG-M5C=MA=.LA=MA=M5C=.LT=MA=MG-.LG-M5C- | 5996 | GTGGAGCAAA |
| | 11225 | MA-.L5C-MT=MG | | CTAGGCACTG |
| 495 | CO- | MG=MT=.LG-MG=MA=.LG=M5C=MA-.LA=MA=M5C=.LT=MA- | 5997 | GTGGAGCAAA |
| | 11226 | MG=.LG=M5C=MA=.L5C-MT=MG | | CTAGGCACTG |
| 496 | CO- | MG=MT=.LG=MG-MA=.LG=M5C=MA-.LA=MA=M5C=.LT-MA=MG=.LG=M5C- | 5998 | GTGGAGCAAA |
| | 11227 | MA=.L5C=MT=MG | | CTAGGCACTG |
| 497 | CO- | MG=MT=.LG=MG=MA-.LG=M5C=MA=.LA-MA=M5C=.LT=MA-MG=.LG=M5C= | 5999 | GTGGAGCAAA |
| | 11228 | MA-L5C=MT=MG | | CTAGGCACTG |
| 498 | CO- | MG=MT-.LG=MG=MA=.LG-M5C=MA=.LA=MA-M5C=.LT=MA=MG- | 6000 | GTGGAGCAAA |
| | 11229 | LG=M5C=MA=.L5C-MT=MG | | CTAGGCACTG |
| 499 | CO- | MG=MT-.LG=MG=MA-.LG=M5C=MA-.LA=MA=M5C-.LT=MA=MG-.LG=M5C=MA- | 6001 | GTGGAGCAAA |
| | 11230 | .L5C=MT=MG | | CTAGGCACTG |
| 500 | CO- | MG=MT=.LG-MG=MA=.LG-M5C=MA=.LA-MA=M5C=.LT-MA=MG=.LG- | 6002 | GTGGAGCAAA |
| | 11231 | M5C=MA=.L5C-MT=MG | | CTAGGCACTG |
| 501 | CO- | MG=MT=.LG-MG=MA-.LG=M5C-MA=.LA-MA=M5C-.LT=MA-MG=.LG-M5C= | 6003 | GTGGAGCAAA |
| | 11232 | MA-L5C=MT=MG | | CTAGGCACTG |
| 502 | CO- | MG=MT-.LG=MG-MA=.LG-M5C=MA-.LA=MA-M5C=.LT-MA=MG-.LG=M5C | 6004 | GTGGAGCAAA |
| | 11233 | -MA=.L5C-MT=MG | | CTAGGCACTG |
| 503 | CO- | MG=MT=MG=MG=.LA-MG-M5C=MA=MA=.LA=M5C=MT=MA=MG-.LG- | 6005 | GTGGAGCAAA |
| | 11234 | M5C=MA=M5C=MT=MG | | CTAGGCACTG |
| 504 | CO- | MG=MT=MG=MG-.LA-MG-M5C=MA=MA=.LA=M5C=MT=MA=MG-.LG-M5C- | 6006 | GTGGAGCAAA |
| | 11235 | MA=M5C=MT=MG | | CTAGGCACTG |
| 505 | CO- | MG=MT=MG-MG-.LA-MG-M5C=MA=MA=.LA=M5C=MT=MA=MG-.LG-M5C-MA- | 6007 | GTGGAGCAAA |
| | 11236 | M5C=MT=MG | | CTAGGCACTG |
| 506 | CO- | MG=MT-MG-MG-.LA-MG-M5C=MA=MA=.LA=M5C=MT=MA=MG-.LG-M5C-MA- | 6008 | GTGGAGCAAA |
| | 11237 | M5C-MT=MG | | CTAGGCACTG |
| 507 | CO- | MG=MT=MG-MG=.LA=MG=M5C=MA-MA=.LA=M5C=MT=MA- | 6009 | GTGGAGCAAA |
| | 11238 | MG=.LG=M5C=MA=M5C-MT=MG | | CTAGGCACTG |
| 508 | CO- | MG=MT=MG=MG-.LA=MG=M5C=MA-MA=.LA=M5C=MT-MA=MG=.LG=M5C- | 6010 | GTGGAGCAAA |
| | 11239 | MA=M5C=MT=MG | | CTAGGCACTG |
| 509 | CO- | MG=MT=MG=MG=.LA-MG=M5C=MA=MA-.LA=M5C=MT=MA-MG=.LG=M5C=MA- | 6011 | GTGGAGCAAA |
| | 11240 | M5C=MT=MG | | CTAGGCACTG |
| 510 | CO- | MG=MT-MG=MG=.LA=MG-M5C=MA=MA=.LA-M5C=MT=MA=MG- | 6012 | GTGGAGCAAA |
| | 11241 | LG=M5C=MA=M5C-MT=MG | | CTAGGCACTG |
| 511 | CO- | MG=MT-MG=MG=.LA-MG=M5C=MA-MA=.LA=M5C-MT=MA=MG-.LG=M5C=MA- | 6013 | GTGGAGCAAA |
| | 11242 | M5C=MT=MG | | CTAGGCACTG |
| 512 | CO- | MG=MT=MG-MG=.LA=MG-M5C=MA=MA-.LA=M5C=MT-MA=MG=.LG- | 6014 | GTGGAGCAAA |
| | 11243 | M5C=MA=M5C-MT=MG | | CTAGGCACTG |
| 513 | CO- | MG=MT=MG-MG=.LA-MG=M5C-MA=MA-.LA=M5C-MT=MA-MG=.LG-M5C=MA- | 6015 | GTGGAGCAAA |
| | 11244 | M5C=MT=MG | | CTAGGCACTG |
| 514 | CO- | MG=MT-MG=MG-.LA=MG-M5C=MA-MA=.LA-M5C=MT-MA=MG-.LG=M5C- | 6016 | GTGGAGCAAA |
| | 11245 | MA=M5C-MT=MG | | CTAGGCACTG |
| 515 | CO- | MT=MG=MT-MT=MT=MT=MG=M5C-MT=MT=MG=MG=MT-M5C=MA=MA=MG=MA- | 6017 | TGTTTTGCTT |
| | 12367 | MG=MG-.[TEG] | | GGTCAAGAGG |
| 516 | CO- | MG=MT=MG=MA=MG=MG=M5C=MA=MT=M5C=MA=MG=MG=MT=MA=MA=MG=M | 6018 | GTGAGGCATC |
| | 12368 | T=MT=M5C-.[TEG] | | AGGTAAGTTC |
| 517 | CO- | MG=MT=MG-MA=MG=MG-M5C=MA=MT-M5C=MA=MG-MG=MT=MA-MA=MG=MT- | 6019 | GTGAGGCATC |
| | 12754 | MT=M5C | | AGGTAAGTTC |
| 518 | CO- | MG=MT=MG-MA=MG-MG=M5C-MA=MT-M5C=MA-MG=MG-MT=MA-MA=MG- | 6020 | GTGAGGCATC |
| | 12755 | MT=MT=M5C | | AGGTAAGTTC |
| 519 | CO- | MG=MT=MG=MA=MG-MG-M5C=MA=MT=M5C=MA=MG=MG=MT-MA- | 6021 | GTGAGGCATC |
| | 12745 | MA=MG=MT=MT=M5C | | AGGTAAGTTC |
| 520 | CO- | MG=MT=MG=MA-MG-MG-M5C=MA=MT=M5C=MA=MG=MG=MT-MA-MA- | | |
| | 12746 | MG=MT=MT=M5C | | |
| 521 | CO- | MG=MT=MG-MA-MG-MG-M5C=MA=MT=M5C=MA=MG=MG=MT-MA-MA-MG- | | |
| | 12747 | MT=MT=M5C | | |
| 522 | CO- | MG=MT-MG-MA-MG-MG-M5C=MA=MT=M5C=MA=MG=MG=MT-MA-MA-MG-MT- | | |
| | 12748 | MT=M5C | | |
| 523 | CO- | MG=MT=MG-MA=MG=MG=M5C=MA-MT=M5C=MA=MG=MG- | | |
| | 12749 | MT=MA=MA=MG=MT-MT=M5C | | |
| 524 | CO- | MG=MT=MG=MA-MG=MG=M5C=MA-MT=M5C=MA=MG-MG=MT=MA=MA- | | |
| | 12750 | MG=MT=MT=M5C | | |
| 525 | CO- | MG=MT=MG=MA=MG-MG=M5C=MA=MT-M5C=MA=MG=MG-MT=MA=MA=MG- | | |
| | 12751 | MT=MT=M5C | | |
| 526 | CO- | MG=MT-MG=MA=MG=MG-M5C=MA=MT=M5C-MA=MG=MG=MT-MA=MA=MG=MT- | | |
| | 12752 | MT=M5C | | |
| 527 | CO- | MG=MT-MG=MA=MG-MG=M5C=MA-MT=M5C=MA-MG=MG=MT-MA=MA=MG- | | |
| | 12753 | MT=MT=M5C | | |
| 528 | CO- | MG=MT-MG=MA-MG=MG-M5C=MA-MT=M5C-MA=MG-MG=MT-MA=MA-MG=MT- | | |
| | 12756 | MT=M5C | | |
| 529 | CO- | MT=MA=MG=M5C=MT=dA=d5C=d5C=d5C=dT=dT=dT=dG=dT=dT=dT=M5C= | | |
| | 13566 | MT=MG=MG=M5C | | |
| 530 | CO- | MG=MA=M5C=MA=M5C=dA=d5C-dA=dG=d5C=dA=dT=d5C=dA=dA=M5C=M5C= | | |
| | 13575 | MG=MA=M5C | | |
| 531 | CO- | MT=MA=MT=M5C=MA=dG=d5C=d5C=dA=dT=dA=dG=d5C=d5C=d5C=MT=M5C=MA= | | |
| | 13576 | MG=MG | | |
| 532 | CO- | M5C=M5C=MT=M5C=MA=dA=d5C=dG=dG=dT=dG=d5C=d5C=dT=d5C=MT=MG=MA= | | |
| | 13577 | MA=MG | | |
| 533 | CO- | M5C=MT=MT=MT=MG=dG=dT=dG=dT=dT=dA=d5C=dA=dT=dT=M5C=MT=MG=MT= | | |
| | 13578 | MT | | |
| 534 | CO- | MT=MG=M5C=M5C=MA=dT=dA=dA=dA=dA=dT=dG=d5C=d5C=d5C=MA=MA=MG=M | | |
| | 13579 | T=MT | | |
| 535 | CO- | MG=MA=MT=MT=MG=d5C=dA=dA=dG=d5C=d5C=d5C=d5C=dT=dT=MG=MA=MA=M | | |
| | 13580 | T=MA | | |
| 536 | CO- | MG=MT=MT=MT=MA=d5C=dA=d5C=dT=d5C=d5C=dA=d5C=d5C=d5C=M5C=MA= | | |
| | 13581 | M5C=MT=M5C | | |
| 537 | CO- | M5C=M5C=MT=M5C=M5C=dA=dT=dT=dT=d5C=d5C=d5C=dT=dG=dT=M5C=MT= | | |
| | 13582 | MA=MG=MG | | |
| 538 | CO- | M5C=MA=M5C=MT=MG=dT=dG=dA=dT=dT=dG=dT=d5C=dT=d5C=MT=MG=MG=MT= | | |
| | 13583 | MT | | |
| 539 | CO- | MG=M5C=MT=MT=MT=dT=dT=dA=dG=dA=dG=dA=dT=dG=dT=MT=MA=MG=MA=M | | |
| | 13584 | G | | |
| 540 | CO- | MG=MG=MG=MA=MG=dT=d5C=dA=d5C=dA=dT=dA=dT=dT=dG=M5C=MT=MA=MA= | | |
| | 13585 | MT | | |
| 541 | CO- | MG=MG=MG=MA=MG=dA=dA=dA=dG=dT=dT=dT=dG=dT=dT=MT=M5C=MT=MA=M | | |
| | 13586 | G | | |
| 542 | CO- | M5C=MA=MT=MT=MT=d5C=dT=dT=d5C=dA=dT=dT=dG=dT=d5C=M5C=M5C= | | |
| | 13587 | MG=MG=MT | | |
| 543 | CO- | MT=MA=MT=M5C=MT=dT=dT=dT=d5C=dT=d5C=d5C=dA=dA=d5C=MA=M5C= | | |
| | 13588 | M5C=MG=MT | | |
| 544 | CO- | MT=MA=MA=MT=MG=d5C=dA=dG=dA=dA=d5C=dT=dA=d5C=dA=M5C=M5C=MG=M | | |
| | 13589 | A=M5C | | |
| 545 | CO- | MT=MT=M5C=MT=MA=d5C=d5C=d5C=dT=dT=dG=dA=dA=dA=dG=M5C=MT=MG=MG | | |
| | 13590 | =MT | | |
| 546 | CO- | MG=M5C=MA=M5C=MA=dA=dT=dT=d5C=dT=dG=dT=dT=dT=dG=M5C=MT=M5C=MT | | |
| | 13591 | =MG | | |
| 547 | CO- | MG=MT=MG=MT=MG=dG=dT=dA=d5C=dA=dA=dA=dT=dG=dG=M5C=M5C=MG=MA= | | |
| | 13592 | MA | | |
| 548 | CO- | MG=MA=MG=MA=MG-dA=dG=dA=dG=dA=dG=dT=dG=dG=dT=MG=MT=MA=M5C=M | | |
| | 13593 | A | | |
| 549 | CO- | M5C=MA=MA=MT=MA=d5C=dA=dG=dA=dT=dG=dA=d5C=dT=d5C=MT=MT=MG=MG | | |
| | 13594 | =MT | | |
| 550 | CO- | MT=MG=MG=MA=MT=dA=dG=dA=dA=dA=d5C=dT=dT=dA=d5C=MA=MG=MG=MA= | | |
| | 13595 | MT | | |
| 551 | CO- | MG=MT=MA=MA=MA=d5C=dA=dA=d5C=dG=d5C=dT=dA=d5C=dA=MA=MT=MA=M5 | | |
| | 13596 | C=MT | | |
| 552 | CO- | MT=MA=MA=MA=M5C=dA=dT=dT=dG=dG=dT=d5C=dT=d5C=dT=MT=MG=MT=M5C= | | |
| | 13597 | M5C | | |
| 553 | CO- | MT=MT=MG=MT=MG=dG=dA=dG=dT=dG=dG=dA=dG=dT=dG=MT=MT=MT=M5C=MT | | |
| | 13598 | | | |
| 554 | CO- | M5C=M5C=M5C=MT=M5C=dT=dT=d5C=d5C=d5C=dT=dT=dT=dA=dA=M5C= | | |
| | 13599 | MT=M5C=MT=MT | | |
| 555 | CO- | MA=MT=MT=M5C=MA=dT=dA=dT=dT=d5C=dA=d5C=dA=dG=dG=MT=MA=MA=MG= | | |
| | 13600 | MT | | |
| 556 | CO- | MA=MG=MA=MA=MT=dG=dA=dT=dG=dA=dA=dA=dA=d5C=d5C=MG=MA=MG=MG= | | |
| | 13601 | MT | | |
| 557 | CO- | MG=MT=MT=MT=MG=dA=dA=dT=dT=d5C=dT=dG-dT=dT=d5C-MA=MG=MT=MG=M | | |
| | 13602 | 5C | | |
| 558 | CO- | MG=MA=MT=M5C=M5C=dT=dT=dA=dG=dG=d5C=dA=dA=dA=dT=MA=MG=MA=MT= | | |
| | 13603 | MA | | |
| 559 | CO- | MG=MT=M5C=MA=M5C=dT=dG=dA=dA=d5C=dT=dG=dT=dG=d5C=MT=MT=MG= | | |
| | 13604 | MG=MG | | |
| 560 | CO- | MG=M5C=MT=M5C=MT=dG=dA=dG=dT=dA=dT=dG=dT=dT=dT=M5C=MT=M5C= | | |
| | 13605 | MG=MT | | |
| 561 | CO- | MT=M5C=MA=MG=M5C=dA=dA=dT=dT=dT=d5C=d5C=dA=dA=dG=MG=M5C= | | |
| | 13606 | M5C=MT=MG | | |
| 562 | CO- | MG=M5C=MT=M5C=MA=dA=dT=dT=dT=dG=d5C=d5C=dT=d5C=dT=M5C=MG= | | |
| | 13607 | MT=MT=M5C | | |
| 563 | CO- | MG=MT=MA=MA=MA=dA=dA=dA=dT=dA=dA=dG=dG=dG=dT=MT=MG=MG=MG=M | | |
| | 13608 | A | | |
| 564 | CO- | M5C=MT=MT=MT=MT=dA=dG=dG=dG=dT=dA=dT=dT=dT=dG=MT=M5C=MT=M5C= | | |
| | 13609 | M5C | | |
| 565 | CO- | MG=M5C=MA=MA=MG=dG=d5C=dT=dG=dT=dT=dT=d5C=dA=dA=MA=MT=MG=MT= | | |
| | 13610 | MT | | |
| 566 | CO- | MG=MT=MG=MT=MG=dT=d5C=d5C=dA=dT=dG=d5C=d5C=dA=dG=MG=MG= | | |
| | 13611 | MT=MG=M5C | | |
| 567 | CO- | MG=M5C=MT=MT=MA=dT=dA=d5C=dA=dG=dA=dG=d5C=dT=dT=M5C=MA= | | |
| | 13612 | MT=M5C=MT | | |
| 568 | CO- | M5C=MT=M5C=MA=MA=dG=dA=d5C=d5C=dT=dG=dT=dT=d5C=dA=MT=MT= | | |
| | 13613 | MT=MG=MA | | |
| 569 | CO- | MG=MA=MG=MG=MA=dA=dG=dA=dG=dG=d5C=dA=dG=d5C=dA=M5C=MA= | | |
| | 13614 | MA=MA=MT | | |
| 570 | CO- | MG=MG=MG=MA=MA=dA=dA=dG=dT=dA=dA=dG=d5C=dT=d5C=MA=MG=MG= | | |
| | 13615 | M5C=MA | | |
| 571 | CO- | MT=MG=MA=MA=MG=dG=d5C=dT=dG=dG=dA=dG=dT=dG=dA=MG=MA=MG- | | |
| | 13616 | MG=M5C | | |
| 572 | CO- | MG=MT=MT=MG=MA=dG=dA=dG=dG=d5C=d5C=d5C=dA=dA=dA=MT=MG= | | |
| | 13617 | MA=MG=MG | | |
| 573 | CO- | MG=MA=MT=MA=MG=d5C=dA=d5C=d5C=d5C=dA=dA=d5C=dT=d5C=M5C= | | |
| | 13618 | MT=MA=MG=MG | | |
| 574 | CO- | MG=MG=M5C=MT=MT=d5C=dA=d5C=dA=dT=d5C=dT=dA=d5C=dT=MA=MG= | | |
| | 13619 | MT=MT=MG | | |
| 575 | CO- | MG=M5C=MA=M5C=MA=dG=dA=dG=dT=dG=dG=dA=dA=dG=dA=MA=MG=MG= | | |
| | 13620 | MT=MT | | |
| 576 | CO- | MA=MT-MT=MA=MA=dG=dA=dA=dG=d5C=dA=d5C=dT=dG=dG=M5C=M5C= | | |
| | 13621 | M5C=MA=MT | | |
| 577 | CO- | MG=MA=M5C=MA=M5C=MA=M5C=MA=MG=M5C=MA=MT=M5C=MA=MA=M5C=M | | |
| | 13622 | 5C=MG=MA=M5C | | |
| 578 | CO- | MT=MA=MT=M5C=MA=MG=M5C=M5C=MA=MT=MA=MG=M5C=M5C=M5C=MT=M5 | | |
| | 13623 | C=MA=MG=MG | | |
| 579 | CO- | M5C=M5C=MT=M5C=MA=MA=M5C=MG=MG=MT=MG=M5C=M5C=MT=M5C=MT=M | | |
| | 13624 | G=MA=MA=MG | | |
| 580 | CO- | M5C=MT=MT=MT=MG=MG=MT=MG=MT=MT=MA=M5C=MA=MT=MT=M5C=MT=M | | |
| | 13625 | G=MT=MT | | |
| 581 | CO- | MT=MG=M5C=M5C=MA=MT=MA=MA=MA=MA=MT=MG=M5C=M5C=M5C=MA=MA | | |
| | 13626 | =MG=MT=MT | | |
| 582 | CO- | MG=MA=MT=MT=MG=M5C=MA=MA=MG=M5C=M5C=M5C=M5C=MT=MT=MG=MA | | |
| | 13627 | =MA=MT=MA | | |
| 583 | CO- | MG=MT=MT=MT=MA=M5C=MA=M5C=MT=M5C=M5C=MA=M5C=M5C=M5C=M5C= | | |
| | 13628 | MA=M5C=MT=M5C | | |
| 584 | CO- | M5C=M5C=MT=M5C=M5C=MA=MT=MT=MT=M5C=M5C=M5C=MT=MG=MT=M5C= | | |
| | 13629 | MT=MA=MG=MG | | |
| 585 | CO- | M5C=MA=M5C=MT=MG=MT=MG=MA=MT=MT=MG=MT=M5C=MT=M5C=MT=MG= | | |
| | 13630 | MG=MT=MT | | |
| 586 | CO- | MG=M5C=MT=MT=MT=MT=MT=MA=MG=MA=MG=MA=MT=MG=MT=MT=MA=MG | | |
| | 13631 | =MA=MG | | |
| 587 | CO- | MG=MG=MG=MA=MG=MT=M5C=MA=M5C=MA=MT=MA=MT=MT=MG=M5C=MT= | | |
| | 13632 | MA=MA=MT | | |
| 588 | CO- | MG=MG=MG=MA=MG=MA=MA=MA=MG=MT=MT=MT=MG=MT=MT=MT=M5C=MT | | |
| | 13633 | =MA=MG | | |
| 589 | CO- | M5C=MA=MT=MT=MT=M5C=MT=MT=M5C=MA=MT=MT=MG=MT=M5C=M5C=M5C | | |
| | 13634 | =MG=MG=MT | | |
| 590 | CO- | MT=MA=MT=M5C=MT=MT=MT=MT=M5C-MT=M5C=M5C=MA=MA=M5C=MA=M5C | | |
| | 13635 | =M5C=MG=MT | | |
| 591 | CO- | MT=MA=MA=MT=MG=M5C=MA=MG=MA=MA=M5C=MT=MA=M5C=MA=M5C=M5C | | |
| | 13636 | =MG=MA=M5C | | |
| 592 | CO- | MT=MT=M5C=MT=MA=M5C=M5C=M5C=MT=MT=MG=MA=MA=MA=MG=M5C=MT | | |
| | 13637 | =MG=MG=MT | | |
| 593 | CO- | MG=M5C=MA=M5C=MA=MA=MT=MT=M5C=MT=MG=MT=MT=MT=MG=M5C=MT= | | |
| | 13638 | M5C=MT=MG | | |
| 594 | CO- | MG=MT=MG=MT=MG=MG=MT=MA=M5C=MA=MA=MA=MT=MG=MG=M5C=M5C= | | |
| | 13639 | MG=MA=MA | | |
| 595 | CO- | MG=MA=MG=MA=MG=MA=MG=MA=MG=MA=MG=MT=MG=MG=MT=MG=MT=MA | | |
| | 13640 | =M5C=MA | | |
| 596 | CO- | M5C=MA=MA=MT=MA=M5C=MA=MG=MA=MT=MG=MA=M5C=MT=M5C=MT=MT= | | |
| | 13641 | MG=MG=MT | | |
| 597 | CO- | MT=MG=MG=MA=MT=MA=MG=MA=MA=MA=M5C=MT=MT=MA=M5C=MA=MG=M | | |
| | 13642 | G=MA=MT | | |
| 598 | CO- | MG=MT=MA=MA=MA=M5C=MA=MA=M5C=MG=M5C=MT=MA=M5C=MA=MA=MT= | | |
| | 13643 | MA=M5C=MT | | |
| 599 | CO- | MT=MA=MA=MA=M5C=MA=MT=MT=MG=MG=MT=M5C=MT=M5C=MT=MT=MG=M | | |
| | 13644 | T=M5C=M5C | | |
| 600 | CO- | MT=MT=MG=MT=MG=MG=MA=MG=MT=MG=MG=MA=MG=MT=MG=MT=MT=MT= | | |
| | 13645 | M5C=MT | | |
| 601 | CO- | M5C=M5C=M5C=MT=M5C=MT=MT=M5C=M5C=M5C=MT=MT=MT=MA=MA=M5C= | | |
| | 13646 | MT=M5C=MT=MT | | |
| 602 | CO- | MA=MT=MT=M5C=MA=MT=MA=MT=MT=M5C=MA=M5C=MA=MG=MG=MT=MA= | | |
| | 13647 | MA=MG=MT | | |
| 603 | CO- | MA=MG=MA=MA=MT=MG=MA=MT=MG=MA=MA=MA=MA=M5C=M5C=MG=MA= | | |
| | 13648 | MG=MG=MT | | |
| 604 | CO- | MG=MT=MT=MT=MG=MA=MA=MT=MT=M5C=MT=MG=MT=MT=M5C=MA=MG=MT | | |
| | 13649 | =MG=M5C | | |
| 605 | CO- | MG=MA=MT=M5C=M5C=MT=MT=MA=MG=MG=M5C=MA=MA-MA=MT=MA=MG= | | |
| | 13650 | MA=MT=MA | | |
| 606 | CO- | MG=MT=M5C=MA=M5C=MT=MG=MA=MA=M5C=MT=MG=MT=MG=M5C=MT=MT= | | |
| | 13651 | MG=MG=MG | | |
| 607 | CO- | MG=M5C=MT=M5C=MT=MG=MA=MG=MT=MA=MT=MG=MT=MT=MT=M5C=MT=M | | |
| | 13652 | 5C=MG=MT | | |
| 608 | CO- | MT=M5C=MA=MG=M5C=MA=MA=MT=MT=MT=M5C=M5C=MA=MA=MG=MG=M5C | | |
| | 13653 | =M5C=MT=MG | | |
| 609 | CO- | MG=M5C=MT=M5C=MA=MA=MT=MT=MT=MG=M5C=M5C=MT=M5C=MT=M5C=MG | | |
| | 13654 | MT=MT=M5C | | |
| 610 | CO- | MG=MT=MA=MA=MA=MA=MA=MA=MT=MA=MA=MG=MG=MG=MT=MT=MG=MG | | |
| | 13655 | =MG=MA | | |
| 611 | CO- | M5C=MT=MT=MT=MT=MA=MG=MG=MG=MT=MA=MT=MT=MT=MG=MT=M5C=MT | | |
| | 13656 | =M5C=M5C | | |
| 612 | CO- | MG=M5C=MA=MA=MG=MG=M5C=MT=MG=MT=MT=MT=M5C=MA=MA=MA=MT= | | |
| | 13657 | MG=MT=MT | | |
| 613 | CO- | MG=MT=MG=MT=MG=MT=M5C=M5C=MA=MT=MG=M5C=M5C=MA=MG=MG=MG= | | |
| | 13658 | MT=MG=M5C | | |
| 614 | CO- | MG=M5C=MT=MT=MA=MT=MA=M5C=MA=MG=MA=MG=M5C=MT=MT=M5C=MA= | | |
| | 13659 | MT=M5C=MT | | |
| 615 | CO- | M5C=MT=M5C=MA=MA=MG=MA=M5C=M5C=MT=MG=MT=MT=M5C=MA=MT=MT | | |
| | 13660 | =MT=MG=MA | | |
| 616 | CO- | MG=MA=MG=MG=MA=MA=MG=MA=MG=MG=M5C=MA=MG=M5C=MA=M5C=MA= | | |
| | 13661 | MA=MA=MT | | |
| 617 | CO- | MG=MG=MG=MA=MA=MA=MA=MG=MT=MA=MA=MG=M5C=MT=M5C=MA=MG= | | |
| | 13662 | MG=M5C=MA | | |
| 618 | CO- | MT=MG=MA=MA=MG=MG=M5C=MT=MG=MG=MA=MG=MT=MG-MA=MG=MA=M | | |
| | 13663 | G=MG=M5C | | |
| 619 | CO- | MG=MT=MT=MG=MA=MG=MA=MG=MG=M5C=M5C=M5C=MA=MA=MA=MT=MG= | | |
| | 13664 | MA=MG=MG | | |
| 620 | CO- | MG=MA=MT=MA=MG=M5C=MA=M5C=M5C=M5C=MA=MA=M5C=MT=M5C=M5C= | | |
| | 13665 | MT=MA=MG=MG | | |
| 621 | CO- | MG=MG=M5C=MT=MT=M5C=MA=M5C=MA=MT=M5C=MT=MA=M5C=MT=MA=MG | | |
| | 13666 | =MT=MT=MG | | |
| 622 | CO- | MG=M5C=MA=M5C=MA=MG=MA=MG=MT=MG=MG=MA=MA=MG=MA=MA=MG= | | |
| | 13667 | MG=MT=MT | | |
| 623 | CO- | MA=MT=MT=MA=MA=MG=MA=MA=MG=M5C=MA=M5C=MT=MG=MG=M5C=M5C= | | |
| | 13668 | M5C=MA=MT | | |
| 624 | CO- | MT=MG=MG=M5C=MT=dA=d5C=d5C=d5C=dT=dT=dT=dG=d5C=dT=dT=M5C= | | |
| | 13914 | MT=MG=M5C=M5C-.[TEG] | | |
| 625 | CO- | MT=MG=MG=MA=MG=dT=dG=dA=dG=dA=dG=dG=d5C=dA=dT=MT=MT=MA= | | |
| | 15363 | MG=MG | | |
| 626 | CO- | MA=MA=MG=MG=M5C=dT=dG=dG=dA=dG=dT=dG=dA=dG=dA=MG=MG=M5C= | | |
| | 15364 | MA=MT | | |
| 627 | CO- | MT=MG=MT=MT=MT=M5C=MT=M5C=MG=MT=MA=MT=MG=MT=M5C=MA=M5C= | | |
| | 15353 | MT=MG=MA | | |
| 628 | CO- | MT=MA=MT=MG=MT=MT=MT=M5C=MT=M5C=MG=MT=MA=MT=MG=MT=M5C=M | | |
| | 15354 | A=M5C=MT | | |
| 629 | CO- | MA=MG=MT=MA=MT=MG=MT=MT=MT=M5C=MT=M5C=MG=MT=MA=MT=MG=MT | | |
| | 15355 | =M5C=MA | | |
| 630 | CO- | MT=MG=MA=MG=MT=MA=MT=MG=MT=MT=MT=M5C=MT=M5C=MG=MT=MA=MT | | |
| | 15356 | =MG=MT | | |
| 631 | CO- | MT=M5C=MT=MG=MA=MG=MT=MA=MT=MG=MT=MT=MT=M5C=MT=M5C=MG=M | | |
| | 15357 | T=MA=MT | | |
| 632 | CO- | MT=MT=MG=M5C=MT=M5C=MT=MG=MA=MG=MT=MA=MT=MG=MT=MT=MT=M5 | | |
| | 15358 | C=MT=M5C | | |
| 633 | CO- | MA=MT=MT=MT=MG=MT=M5C=MT=M5C=M5C=MA=M5C=MA=MA=MA=MA=M5C | | |
| | 15359 | =MT=M5C=MT | | |
| 634 | CO- | MG=MG=MT=MA=MT=MT=MT=MG=MT=M5C=MT=M5C=M5C=MA=M5C=MA=MA= | | |
| | 15360 | MA=MA=M5C | | |
| 635 | CO- | MT=MT=MT=MA=MG=MG=MG=MT=MA=MT=MT=MT=MG=MT=M5C=MT=M5C=M5 | | |
| | 15361 | C=MA=M5C | | |
| 636 | CO- | MT=MG=MT=MT=M5C=MT=MT=MT=MT=MA=MG=MG=MG=MT=MA=MT=MT=MT= | | |
| | 15362 | MG=MT | | |
| 637 | CO- | MG=M5C=MT=MG=MA=dA=dG=dG=d5C=dT=dG=dG=dA=dG=dT=MG=MA=MG= | | |
| | 15365 | MA=MG | | |
| 638 | CO- | MT=MG=M5C=MT=MG=dA=dA=dG=dG=d5C=dT=dG=dG=dA=dG=MT=MG=MA=MG= | | |
| | 15366 | MA | | |
| 639 | CO- | M5C=MA=MT=MT=MG=d5C=dT=dG=dA=dA=dG=dG=d5C=dT=dG=MG=MA=MG= | | |
| | 15367 | MT=MG | | |
| 640 | CO- | MG=MA=MA=MG=M5C=dA=d5C=dT=dG=dG=d5C=d5C=d5C=dA=dT=M5C=MA= | | |
| | 15368 | MA=MT=MT | | |
| 641 | CO- | MA=MA=MG=MA=MA=dG=d5C=dA=d5C=dT=dG=dG=d5C=d5C=d5C=MA=MT= | | |
| | 15369 | M5C=MA=MA | | |
| 642 | CO- | MA=MA=MA=MT=MT=dA=dA=dG=dA=dA=dG=d5C=dA=d5C=dT=MG=MG=M5C= | | |
| | 15370 | M5C=M5C | | |
| 643 | CO- | MT=MG=M5C=MA=MA=dA=dT=dT=dA=dA=dG=dA=dA=dG=d5C=MA=M5C=MT= | | |
| | 15371 | MG=MG | | |
| 644 | CO- | MT=MG=MT-MT=MT=dT=dG=d5C-dT=dT=dG=dG=dT-d5C=dA=MA=MG=MA- | | |
| | 15373 | MG=MG | | |

[0093] Additional ASO sequences that target ABCB11 regRNAs RR62_v1, RR62_v2, RR63_v1, RR63_v2, RR64_v1, RR64_v2, RR65_v1, RR74_v1, and RR84_v1 are provided in Tables 3-11. In some embodiments, an ASO of the disclosure comprises or consists of a nucleotide sequence selected from any one of the ASOs provided in Tables 2-11. In some embodiments, the ASO comprises or consists of a nucleotide sequence as set for in any one of SEQ ID NOs: 14-644, 645-954, 955-1517, 1518-2057, 2058-2308, 2309-2806, 2807-3956, 3957-4061, 4062-5228, 5229-5519, or 5520-6021.

TABLE 3
Exemplary ASOs that target regRNA RR62_v1 and
RR62_v2

| SEQ ID | |
|---|---|
| NO | Sequence |
| 645 | GGAATTTATAGTTTTCACCT |
| 646 | TCAGAGGAATTTATAGTTTT |
| 647 | GGCTCCCTCAGAGGAATTTA |
| 648 | GGAATGGCTCCCTCAGAGGA |
| 649 | ACACTAGGAATGGCTCCCTC |
| 650 | GAAAGACACTAGGAATGGCT |
| 651 | CTTGGCTAGAAAGACACTAG |
| 652 | GCACATCTTGGCTAGAAAGA |
| 653 | GTGGGGCACATCTTGGCTAG |
| 654 | GAATCAAGGGTGGGGCACAT |
| 655 | GTTCAAGAATCAAGGGTGGG |
| 656 | ATTCAGGTTCAAGAATCAAG |
| 657 | CCCACATATTCAGGTTCAAG |
| 658 | TAGGAACCCACATATTCAGG |
| 659 | TTATTTGCACATAGGAACCC |
| 660 | ACAGCTTATTTGCACATAGG |
| 661 | TCAGAACAGCTTATTTGCAC |
| 662 | TGGCTCAAGTTCAGAACAGC |
| 663 | CTCATGCTGGCTCAAGTTCA |
| 664 | GTGTGCCTCATGCTGGCTCA |
| 665 | CTTTGCAGTGTGCCTCATGC |
| 666 | GCATGGCCTTTGCAGTGTGC |
| 667 | GTCATAGCATGGCCTTTGCA |
| 668 | ACTCACTGTCATAGCATGGC |
| 669 | GGGCTGACTCACTGTCATAG |
| 670 | ACTCAGGGCTGACTCACTGT |
| 671 | CGTGTACTCAGGGCTGACTC |
| 672 | GTCTGTCGTGTACTCAGGGC |
| 673 | AGTGAGTCTGTCGTGTACTC |
| 674 | TGTAATCAGTGAGTCTGTCG |
| 675 | GCCACCTTGTAATCAGTGAG |
| 676 | TGACAGGCCACCTTGTAATC |
| 677 | TGATAAGCCTGACAGGCCAC |
| 678 | TTCTTTGTGATAAGCCTGAC |
| 679 | CTGTTTTCTTTGTGATAAGC |
| 680 | TATGCTACTGTTTTCTTTGT |
| 681 | GTCACTATGCTACTGTTTTC |
| 682 | ACACAGTCACTATGCTACTG |
| 683 | CACAGACACAGTCACTATGC |
| 684 | GAACTCACACAGACACAGTC |
| 685 | GTAGCCAGAACTCACACAGA |
| 686 | CGCAGAAGTAGCCAGAACTC |
| 687 | GCAACCACGCAGAAGTAGCC |
| 688 | CAGAGGCAACCACGCAGAAG |
| 689 | GTGATCAGAGGCAACCACGC |
| 690 | GTGCTGTGATCAGAGGCAAC |
| 691 | ACTAGGGCAGTGCTGTGATC |
| 692 | AGAAAACTAGGGCAGTGCTG |
| 693 | AGGCGTGAGAAAACTAGGGC |
| 694 | AATCTCCTCAGGTCATCTGC |
| 695 | GTAGTTGAGTTTGTTTTTTT |
| 696 | CAACCAGTAGTTGAGTTTGT |
| 697 | CTAGTCTCAACCAGTAGTTG |
| 698 | GTACACTAGTCTCAACCAGT |
| 699 | GTAAGGTACACTAGTCTCAA |
| 700 | CTTTGAGTAAGGTACACTAG |
| 701 | TGCATTACTTTGAGTAAGGT |
| 702 | CAGGCTGCATTACTTTGAGT |
| 703 | TCATGAACAGGCTGCATTAC |
| 704 | GAATTTCATGAACAGGCTGC |
| 705 | GTAATGGGAATTTCATGAAC |
| 706 | CCATCTGTAATGGGAATTTC |
| 707 | ACCCTTCCATCTGTAATGGG |
| 708 | GATCTTAACCCTTCCATCTG |
| 709 | CCACTTGATCTTAACCCTTC |
| 710 | GTGATCCACTTGATCTTAAC |
| 711 | TGGCTGGTGATCCACTTGAT |
| 712 | GTGGCTGTGGCTGGTGATCC |
| 713 | TTAGCTTTGTGGCTGTGGCT |
| 714 | TCTGCCCCTTAGCTTTGTGG |
| 715 | TCCCCTCTGCCCCTTAGCTT |
| 716 | CCAACTCCCCTCTGCCCCTT |
| 717 | CCCCCACCAACTCCCCTCTG |
| 718 | ATTTTTCCCCCCCACCAACT |
| 719 | GAGTTCTATTTTTCCCCCCC |
| 720 | TCATCTCCAAGAGTTCTATT |
| 721 | GAGTATCATCTCCAAGAGTT |
| 722 | TTTACTTGAGTATCATCTCC |
| 723 | CCCATGAATTTTACTTGAGT |
| 724 | GGAGGTGACCCATGAATTTT |
| 725 | ACTAGGGAGGTGACCCATGA |
| 726 | ACGTCACTAGGGAGGTGACC |
| 727 | ACTTAACGTCACTAGGGAGG |
| 728 | CCAATACTTAACGTCACTAG |
| 729 | CACTACCAATACTTAACGTC |
| 730 | GCATGACACTACCAATACTT |
| 731 | GGCTTGAGCATGACACTACC |
| 732 | AGTATAGGCTTGAGCATGAC |
| 733 | TATTGAGTATAGGCTTGAGC |
| 734 | ACCACTTTATTGAGTATAGG |
| 735 | ATGTTACCACTTTATTGAGT |
| 736 | GCCAAAATGTTACCACTTTA |
| 737 | TACATTGCCAAAATGTTACC |
| 738 | ACCAAATACATTGCCAAAAT |
| 739 | CACTCACCAAATACATTGCC |
| 740 | GAAAGTCACTCACCAAATAC |
| 741 | CAGGATTGAAAGTCACTCAC |
| 742 | TAGAAACAGGATTGAAAGTC |
| 743 | TCTTAATAGAAACAGGATTG |
| 744 | TTACTATGTTTTAAAATCTT |
| 745 | CTATCTTACTATGTTTTAAA |
| 746 | CAAGTTTCCTTCTATCTTAC |
| 747 | TGCCTCAAGTTTCCTTCTAT |
| 748 | TACTCTGCCTCAAGTTTCCT |
| 749 | TTTCTAGAAATTACTCTGCC |
| 750 | GAGTTTACCCATATTTCTAG |
| 751 | AACATGAGTTTACCCATATT |
| 752 | ATAGAAACATGAGTTTACCC |
| 753 | AAAGAGAATAGAAACATGAG |
| 754 | ATCTAACACAAAGAGAATAG |
| 755 | GTGGTATCTAACACAAAGAG |
| 756 | GCTGGAGTGGTATCTAACAC |
| 757 | GGCTGAGCTGGAGTGGTATC |
| 758 | TTTACTGGCTGAGCTGGAGT |
| 759 | GGGGATTTTACTGGCTGAGC |
| 760 | TATAGAGGGGATTTTACTGG |
| 761 | TCAAAATGTATAGAGGGGAT |
| 762 | GTAATTCAAAATGTATAGAG |
| 763 | ATATCTTAAATTGTAATTCA |
| 764 | TTGCTCATATCTTAAATTGT |
| 765 | ACTTTTTTGCTCATATCTTA |
| 766 | AATTTTTTACTTTTTTGCTC |
| 767 | ACGTTGTGGGTAGGTTGTTT |
| 768 | ATGGAACACGTTGTGGGTAG |
| 769 | CATGACAAATGGAACACGTT |
| 770 | ACCAGAACATGACAAATGGA |
| 771 | TCCCTCAACCAGAACATGAC |
| 772 | CTAACAGTTCCCTCAACCAG |
| 773 | TATGGACTAACAGTTCCCTC |
| 774 | ACACCATTGTATGGACTAAC |
| 775 | GTGTGAATAACACCATTGTA |
| 776 | TCCAGGAAAAGCATGTGTGA |
| 777 | CCAGATTCCAGGAAAAGCAT |
| 778 | AAGAACTCCAGATTCCAGGA |
| 779 | AGTTACAAGAACTCCAGATT |
| 780 | CGACGTTGAGTTACAAGAAC |
| 781 | ATTGACTACGACGTTGAGTT |
| 782 | TGTTTTTATTGACTACGACG |
| 783 | TGACAGATGTTTTTATTGAC |
| 784 | CACAATGACAGATGTTTTTA |
| 785 | TTTGGCACAATGACAGATGT |
| 786 | TACTCATTTTTGGCACAATG |
| 787 | GCGTGCTACTCATTTTTGGC |
| 788 | GCCAGGCGTGCTACTCATTT |
| 789 | GCCCAGCCAGGCGTGCTACT |
| 790 | GGAATAGCCCAGCCAGGCGT |
| 791 | ATTTCTCCATGGAATAGCCC |
| 792 | GTGTGCATTTCTCCATGGAA |
| 793 | AGTTTGTGTGCATTTCTCCA |
| 794 | TTGTGGGAAGTTTGTGTGCA |
| 795 | TGATGTTTGTGGGAAGTTTG |
| 796 | TTGGCTGATGTTTGTGGGAA |
| 797 | GACATTTGGCTGATGTTTGT |
| 798 | CAACTGACATTTGGCTGATG |
| 799 | CTTCATCAACTGACATTTGG |
| 800 | TCGGTTTTCTTCATCAACTG |
| 801 | AAGTTTCGGTTTTCTTCATC |
| 802 | CTTTGTTTTTCAAGTTTCGG |
| 803 | GAACCCTTTGTTTTTCAAGT |
| 804 | ATGATCTCTGAACCCTTTGT |
| 805 | CCATAGATGATCTCTGAACC |
| 806 | GCTCTTCACCCATAGATGAT |
| 807 | CTCCTGCTCTTCACCCATAG |
| 808 | CTACCTCTCCTGCTCTTCAC |
| 809 | TAGTCCTCCTACCTCTCCTG |
| 810 | ACTAAATTAAGTAGTCCTCC |
| 811 | TAGTAACTAAATTAAGTAGT |
| 812 | TGAGAATCTAGTAACTAAAT |
| 813 | ATTCATGAGAATCTAGTAAC |
| 814 | GAGTACTATTCATGAGAATC |
| 815 | GGTGTTGAGTACTATTCATG |
| 816 | GAAATTTGGTGTTGAGTACT |
| 817 | CCCATGAAATTTGGTGTTGA |
| 818 | GTGATTCCCATGAAATTTGG |
| 819 | CAATTAAGGTGATTCCCATG |
| 820 | TCTGCCACTCAATTAAGGTG |
| 821 | CGAACTCTGCCACTCAATTA |
| 822 | GTATACGAACTCTGCCACTC |
| 823 | AATTAGTATACGAACTCTGC |
| 824 | GCCGTTTATTTCAATATAAT |
| 825 | TACCGTGCCGTTTATTTCAA |
| 826 | TGATGTACCGTGCCGTTTAT |
| 827 | ATAATTGATGTACCGTGCCG |
| 828 | TTTAGATAATTGATGTACCG |
| 829 | AGTCTAATGTTTTAGATAAT |
| 830 | GTAAGAGTCTAATGTTTTAG |
| 831 | ACAATGTAAGAGTCTAATGT |
| 832 | GATCTAACAATGTAAGAGTC |
| 833 | TATAACATGATCTAACAATG |
| 834 | GGAAATTTATAACATGATCT |
| 835 | GAGCAGGAAATTTATAACAT |
| 836 | GAATGAATTCAGAGAGCAGG |
| 837 | TAAACAGAATGAATTCAGAG |
| 838 | TCCTGAAATAAACAGAATGA |
| 839 | TCAGCTCCTGAAATAAACAG |
| 840 | CGAAAGTCAGCTCCTGAAAT |
| 841 | TAAAAACGAAAGTCAGCTCC |
| 842 | GAGTAGCTAAAAACGAAAGT |
| 843 | TAGATGAGTAGCTAAAAACG |
| 844 | CTAAGTTGTAGATGAGTAGC |
| 845 | TTCCCCTAAGTTGTAGATGA |
| 846 | GATTATTTTCCCCTAAGTTG |
| 847 | AATGACAGTGATTATTTTCC |
| 848 | GCATCAATGACAGTGATTAT |
| 849 | CAATGGCATCAATGACAGTG |
| 850 | TTATCTACTTGGCAATGGCA |
| 851 | ACACAGTTTATCTACTTGGC |
| 852 | GCCCCACACAGTTTATCTAC |
| 853 | TCTCAATGCCCCACACAGTT |
| 854 | GTATTTCTCAATGCCCCACA |
| 855 | TTTATAGTATTTCTCAATGC |
| 856 | TCAACAAAACAATTTATAGT |
| 857 | TCAGTTCAACAAAACAATTT |
| 858 | CACTATCAGTTCAACAAAAC |
| 859 | CATAGTCACTATCAGTTCAA |
| 860 | CATTCTTCATAGTCACTATC |
| 861 | AATTGGCATTCTTCATAGTC |
| 862 | GGCAGAAATTGGCATTCTTC |
| 863 | TTCTAGGCAGAAATTGGCAT |
| 864 | GGAGGCATTTCTAGGCAGAA |
| 865 | AGGATGGAGGCATTTCTAGG |
| 866 | TTTTCTCAGGATGGAGGCAT |
| 867 | CCAAATTTTCTCAGGATGGA |
| 868 | TTACTCCAAATTTTCTCAGG |
| 869 | GGTGTTTACTCCAAATTTTC |
| 870 | AAAGTATAGGTGTTTACTCC |
| 871 | GAAATTTTAAAGTATAGGTG |
| 872 | CTTATGACAAATCTTTAGAA |
| 873 | ATTTATTCTTATGACAAATC |
| 874 | TATATATTTATTCTTATGAC |
| 875 | CACAACAATCACATATATAT |
| 876 | GTCATCACAACAATCACATA |
| 877 | GGAAAGTCATCACAACAATC |
| 878 | TTTGTAAGGAAAGTCATCAC |
| 879 | TCATATTTGTAAGGAAAGTC |
| 880 | GGTTATCATATTTGTAAGGA |
| 881 | CCCATGGTTATCATATTTGT |
| 882 | CTAAGCCCATGGTTATCATA |
| 883 | TATCACTAAGCCCATGGTTA |
| 884 | GGAAAATTATCACTAAGCCC |
| 885 | AATGTCTTGGAAAATTATCA |
| 886 | GATCAGAAAAATGTCTTGGA |
| 887 | CAATAGATCAGAAAAATGTC |
| 888 | AATCCTATCCAATAGATCAG |
| 889 | ATACAAATCCTATCCAATAG |
| 890 | AAAGCATACAAATCCTATCC |
| 891 | CTCATAAAGCATACAAATCC |
| 892 | ATATTGCTCATAAAGCATAC |
| 893 | GAAATATATTGCTCATAAAG |
| 894 | CTATTAGAAATATATTGCTC |
| 895 | TGAATAACTATTAGAAATAT |
| 896 | CATGCTGAATAACTATTAGA |
| 897 | GATAACATGCTGAATAACTA |
| 898 | GCCTATGTGATAACATGCTG |
| 899 | GGCTTTGCCTATGTGATAAC |
| 900 | TCATAGGCTTTGCCTATGTG |
| 901 | TTTTCAGTCATAGGCTTTGC |
| 902 | GTGATCACTTTTTCAGTCAT |
| 903 | ACTTCAGTGATCACTTTTTC |
| 904 | GTTTTTAACTTCAGTGATCA |
| 905 | GGCAGGTTTTTAACTTCAGT |
| 906 | GTCATATTGGCAGGTTTTTA |
| 907 | CTTTAGTCATATTGGCAGGT |
| 908 | TAAATCTTTAGTCATATTGG |
| 909 | GGGGAGTGTTAAATCTTTAG |
| 910 | GATCATGAGGGGAGTGTTAA |
| 911 | ATTGTTTAGATCATGAGGGG |
| 912 | TATAAATTGTTTAGATCATG |
| 913 | GCAGCTATAAATTGTTTAGA |
| 914 | GGGTGTGCAGCTATAAATTG |
| 915 | GCAGTGGGTGTGCAGCTATA |
| 916 | TTATGGCAGTGGGTGTGCAG |
| 917 | GTTGATTTATGGCAGTGGGT |
| 918 | ACTGTGTTGATTTATGGCAG |
| 919 | TGGTAATAAAACTGTGTTGA |
| 920 | TCAATTGGTAATAAAACTGT |
| 921 | CTTCTTTCAATTGGTAATAA |
| 922 | GAGTTGGCTTCTTTCAATTG |
| 923 | GGCGTTAGAGTTGGCTTCTT |
| 924 | GTGATGGCGTTAGAGTTGGC |
| 925 | GAAAGGTGATGGCGTTAGAG |
| 926 | GAGAAGAAAGGTGATGGCGT |
| 927 | ACAAGATGAGAAGAAAGGTG |
| 928 | CATCAGGTTACAAGATGAGA |
| 929 | GTTTTTCTCATCAGGTTACA |
| 930 | CTTATGTTTTTCTCATCAGG |
| 931 | AAATCCTTATGTTTTTCTCA |
| 932 | GTGGTCTTTAAATCCTTATG |
| 933 | GAAAGGGTGGTCTTTAAATC |
| 934 | TTGTATTGGAAAGGGTGGTC |
| 935 | TCCCATTGTATTGGAAAGGG |
| 936 | GAATTTCCCATTGTATTGGA |
| 937 | CTAGGGAGAATTTCCCATTG |
| 938 | ATCACCACCTAGGGAGAATT |
| 939 | TCATAAAATCACCACCTAGG |
| 940 | GAATAACTCATAAAATCACC |
| 941 | GGGGATTTTCTTTCTTACTA |
| 942 | GCCAGTGGGGATTTTCTTTC |
| 943 | TTTTCCAGCCAGTGGGGATT |
| 944 | CAGAATTTTCCAGCCAGTGG |
| 945 | TTGGCCAGAATTTTCCAGCC |
| 946 | ATACTAGGTTTGGCCAGAAT |
| 947 | TTAAGATACTAGGTTTGGCC |
| 948 | GCTTGTGTTTAAGATACTAG |
| 949 | GAATAAAGCTTGTGTTTAAG |
| 950 | CTAGAAGAATAAAGCTTGTG |
| 951 | GAAATCTAGAAGAATAAAGC |
| 952 | GAAGAGGGAAATCTAGAAGA |
| 953 | TCTCTAGAAGAGGGAAATCT |
| 954 | CTGAAATCTCTAGAAGAGGG |

TABLE 4
Exemplary ASOs that target regRNA RR62_v2

| SEQ ID | |
|---|---|
| NO | Sequence |
| 955 | ATCATCTCCAAGAGTTCTAT |
| 956 | TGAGTATCATCTCCAAGAGT |
| 957 | TACTTAACGTCACTAGGGAG |
| 958 | GCTATACTGAAATCTCTAGA |
| 959 | GATTGAGCTATACTGAAATC |
| 960 | TAGTGAACCTGAGATTGAGC |
| 961 | ATCGCTAGTGAACCTGAGAT |
| 962 | CTGTGAATCGCTAGTGAACC |
| 963 | GTGTTCATCTCTGTGAATCG |
| 964 | CTCAGGTGTTCATCTCTGTG |
| 965 | ATACCTCTCAGGTGTTCATC |
| 966 | TCTCCATACCTCTCAGGTGT |
| 967 | TTACTTTCTCTCCATACCTC |
| 968 | GGACTTTTTACTTTCTCTCC |
| 969 | GAGTATAGAGGACTTTTTAC |
| 970 | GTTGGTATAACTGGGAGTAT |
| 971 | TATTTGTTGGTATAACTGGG |
| 972 | GGCAAAGAGTTATTTGTTGG |
| 973 | CTGAGGGCAAAGAGTTATTT |
| 974 | CATGACTGAGGGCAAAGAGT |
| 975 | AGGGTCATGACTGAGGGCAA |
| 976 | GATTGAGGGTCATGACTGAG |
| 977 | AAATAGATTGAGGGTCATGA |
| 978 | GCAGTCACAAATAGATTGAG |
| 979 | GGAAATGCAGTCACAAATAG |
| 980 | CCATGAGGAAATGCAGTCAC |
| 981 | ACTTACCCATGAGGAAATGC |
| 982 | ACCACTTCAACTTACCCATG |
| 983 | ATCCAACCACTTCAACTTAC |
| 984 | AATTAGCTAATCCAACCACT |
| 985 | GCTTTAAAATTAGCTAATCC |
| 986 | GAGGAAGCTTTAAAATTAGC |
| 987 | TTAAGCATGAGGAAGCTTTA |
| 988 | TAATATTTTTAAGCATGAGG |
| 989 | TAGTTGTAATATTTTTAAGC |
| 990 | TTAATGTAGTTGTAATATTT |
| 991 | CATTATTTAATGTAGTTGTA |
| 992 | ATCAACATTATTTAATGTAG |
| 993 | ATCATTATCAACATTATTTA |
| 994 | GAATTTTTCATCATTATCAA |
| 995 | GTTCTTGAATTTTTCATCAT |
| 996 | GTGGGCATGTTCTTGAATTT |
| 997 | AAAGTGTGGGCATGTTCTTG |
| 998 | TCTATGAAAAGTGTGGGCAT |
| 999 | ATGATTCTATGAAAAGTGTG |
| 1000 | TAAGGAAATATGATTCTATG |
| 1001 | TGAATGGGAAATATTAAGGA |
| 1002 | TGGGAAATGAAATGAATGGG |
| 1003 | CCTTATGGGAAATGAAATGA |
| 1004 | CATGGCCTTATGGGAAATGA |
| 1005 | GGTTAAACATGGCCTTATGG |
| 1006 | ATACAGGTTAAACATGGCCT |
| 1007 | GGTCAAATACAGGTTAAACA |
| 1008 | TGAAGAGGTCAAATACAGGT |
| 1009 | CCCGAAGTTGAAGAGGTCAA |
| 1010 | AGATCCCCGAAGTTGAAGAG |
| 1011 | GGTTAAGTCAAGATCCCCGA |
| 1012 | TGCGTGACTCAGGTTAAGTC |
| 1013 | GTATTCATGGACTGCGTGAC |
| 1014 | AGGGTGTATTCATGGACTGC |
| 1015 | GGTCCAGGGTGTATTCATGG |
| 1016 | TTCCTGGTGACAGCAAGGTC |
| 1017 | CAGTAGTTCCTGGTGACAGC |
| 1018 | TCAGACAGTAGTTCCTGGTG |
| 1019 | GTTAAACATGTCAGACAGTA |
| 1020 | AAGGAGTTAAACATGTCAGA |
| 1021 | GTGCCAAGGAGTTAAACATG |
| 1022 | CAGTCACAGAGTGCCAAGGA |
| 1023 | ATGGGCAGTCACAGAGTGCC |
| 1024 | GGTACATGGGCAGTCACAGA |
| 1025 | AAATGAGGTACATGGGCAGT |
| 1026 | GAAGCGAGAAAATGAGGTAC |
| 1027 | GTGGAAGGAGGAAGGAAGCG |
| 1028 | CAAATAGGTGTGGAAGGAGG |
| 1029 | CAAGTGAGGTTGACAAATAG |
| 1030 | ATGGCTCAAGTGAGGTTGAC |
| 1031 | AGGACTGCATGGCTCAAGTG |
| 1032 | TGAAGGATTTAAAGGACTGC |
| 1033 | GGAAGGAAATGAAGGATTTA |
| 1034 | AGCAATGGAAGGAAATGAAG |
| 1035 | GGGTTTAGCAATGGAAGGAA |
| 1036 | TTAATGGGGTTTAGCAATGG |
| 1037 | AAATCTTAATGGGGTTTAGC |
| 1038 | GAAGCAAAATCTTAATGGGG |
| 1039 | GCATGGGGAAGGAAGCAAAA |
| 1040 | TTGGCTGCATGGGGAAGGAA |
| 1041 | GGACCTTGGCTGCATGGGGA |
| 1042 | CAGAGGGACCTTGGCTGCAT |
| 1043 | ATGCCTGGCAGAGGGACCTT |
| 1044 | GTTCAAATGCCTGGCAGAGG |
| 1045 | GTGTGGTTCAAATGCCTGGC |
| 1046 | AGGATGATGGTGAGAGTGTG |
| 1047 | ATAATTGAGGATGATGGTGA |
| 1048 | TAGAGAAAATAATTGAGGAT |
| 1049 | TGATGTAGAGAAAATAATTG |
| 1050 | TTACAAGGATGATGTAGAGA |
| 1051 | GAAGTTTACAAGGATGATGT |
| 1052 | GGATGCAGGATGAAGTTTAC |
| 1053 | CAGCTGGATGGATGCAGGAT |
| 1054 | GGCAAACAGCTGGATGGATG |
| 1055 | AAGAGGGCAAACAGCTGGAT |
| 1056 | TAAGGAGAAGAGGGCAAACA |
| 1057 | TGGCTTAAGGAGAAGAGGGC |
| 1058 | AGCAGCCTGGCTTAAGGAGA |
| 1059 | TTGTGTCCAGCAGGCCCAGC |
| 1060 | GTGAGGTTGTGTCCAGCAGG |
| 1061 | CAAGGTGGTGAGGTTGTGTC |
| 1062 | ATTCACAAGGTGGTGAGGTT |
| 1063 | CCTGTGTTGGTATCCATTCA |
| 1064 | TAGACTCTGCCTGTGTTGGT |
| 1065 | GCTGAGTACTAGACTCTGCC |
| 1066 | GGGCAGCTGAGTACTAGACT |
| 1067 | AGCTTAGGGCAGCTGAGTAC |
| 1068 | GAAGGGAAGCTTAGGGCAGC |
| 1069 | GGGCCAGAAGGGAAGCTTAG |
| 1070 | TTCTTTTCTGGGCCAGAAGG |
| 1071 | TAGGATTCTTTTCTGGGCCA |
| 1072 | AAATTTAGGATTCTTTTCTG |
| 1073 | TCAGAAAAAATTTAGGATTC |
| 1074 | GGGGAGTCTCAGAAAAAATT |
| 1075 | GACCGTGGGGAGTCTCAGAA |
| 1076 | GGCCAGACCGTGGGGAGTCT |
| 1077 | GCCAAGGGCCAGACCGTGGG |
| 1078 | AGGTCAGAGAGCCAAGGGCC |
| 1079 | AGTTGGAGGAGGTGAGGTCA |
| 1080 | GAATATAGTTGGAGGAGGTG |
| 1081 | GAGAACTAGAATATAGTTGG |
| 1082 | GTGGGGTGTTGAGAACTAGA |
| 1083 | GGCAAGTGGGGTGTTGAGAA |
| 1084 | GGCCAGGCAAGTGGGGTGTT |
| 1085 | CAAGAGGCCAGGCAAGTGGG |
| 1086 | GTCAGCAAGAGGCCAGGCAA |
| 1087 | GACAAAGGTCAGCAAGAGGC |
| 1088 | GCATGGACAAAGGTCAGCAA |
| 1089 | GTTGGGCATGGACAAAGGTC |
| 1090 | GAACAGTTGGGCATGGACAA |
| 1091 | AGGTGGGAACAGTTGGGCAT |
| 1092 | CCGCACCCAGAGGTGGGAAC |
| 1093 | GGTGCCCGCACCCAGAGGTG |
| 1094 | TAGCAGGTGCCCGCACCCAG |
| 1095 | AAGGAGTAGCAGGTGCCCGC |
| 1096 | GGGGAGAAGGAGTAGCAGGT |
| 1097 | CACCTGGGGAGAAGGAGTAG |
| 1098 | AAATGCACCTGGGGAGAAGG |
| 1099 | CCTAAAGAAAATGCACCTGG |
| 1100 | TGTGGTTACCTAAAGAAAAT |
| 1101 | TGGAGCTGTCCCTGTGGTTA |
| 1102 | GGTGATGGAGCTGTCCCTGT |
| 1103 | GCGGAGGTGATGGAGCTGTC |
| 1104 | AGGTCTAGCGGAGGTGATGG |
| 1105 | TTCAAAGGAAGGTCTAGCGG |
| 1106 | GGTGATTTCAAAGGAAGGTC |
| 1107 | TGAGTAGGTGATTTCAAAGG |
| 1108 | TCTGTTGAGTAGGTGATTTC |
| 1109 | GGCAAGACTCTGTTGAGTAG |
| 1110 | TTTGGCCAGGCAAGACTCTG |
| 1111 | AATTTTAAAGACTTTGGCCA |
| 1112 | GGGGTTGAAATTTTAAAGAC |
| 1113 | CGTGGGGGGTGGGGTTGAAA |
| 1114 | AATGGTGCGTGGGGGGTGGG |
| 1115 | TATGAAATGGTGCGTGGGGG |
| 1116 | GGAGCTATGAAATGGTGCGT |
| 1117 | GAAATGGAGCTATGAAATGG |
| 1118 | AAACTGGAAATGGAGCTATG |
| 1119 | ATCACTTTCTTTCTGAGAAG |
| 1120 | AATCTATCACTTTCTTTCTG |
| 1121 | AGTGATAATCTATCACTTTC |
| 1122 | GTAGCTAGTGATAATCTATC |
| 1123 | GTATAGCATGGTAGCTAGTG |
| 1124 | CAAATGTATAGCATGGTAGC |
| 1125 | TAAATCAAATGTATAGCATG |
| 1126 | CATTGTAAATAAATCAAATG |
| 1127 | ATAAACATTGTAAATAAATC |
| 1128 | GGGAGATATAATAAACATTG |
| 1129 | TTTAGTGAGGGAGATATAAT |
| 1130 | GTTTACATTTTAGTGAGGGA |
| 1131 | GTTGGCCCTTGAGGAGTTTA |
| 1132 | ATAGGCAAAAATGTTGGCCC |
| 1133 | GCGGGTATAGAAAAGAACAA |
| 1134 | GTGCTGCGGGTATAGAAAAG |
| 1135 | TGGTATCAGACACTATTGTA |
| 1136 | CTATTTGGTATCAGACACTA |
| 1137 | TTGAGTGTCTATTTGGTATC |
| 1138 | TGCAAATATTGAGTGTCTAT |
| 1139 | CGTTTTGCAAATATTGAGTG |
| 1140 | TTAATTCATTCGTTTTGCAA |
| 1141 | TCACTCCATTAATTCATTCG |
| 1142 | CACATTCACTCCATTAATTC |
| 1143 | CTGGAGAGCACACATTCACT |
| 1144 | TTGAGCTGGAGAGCACACAT |
| 1145 | TTGCATGTTGAGCTGGAGAG |
| 1146 | AGTGTGCATTGCATGTTGAG |
| 1147 | AGAAATGAAGTGTGCATTGC |
| 1148 | TCCGCAGAGAAATGAAGTGT |
| 1149 | GAGCAATCCGCAGAGAAATG |
| 1150 | AATGGGAGCAATCCGCAGAG |
| 1151 | CTGCTGAGAAGAATGGGAGC |
| 1152 | CAGAGCTGCTGAGAAGAATG |
| 1153 | TTTTGCCAGAGCTGCTGAGA |
| 1154 | GCAAATTTTGCCAGAGCTGC |
| 1155 | GATCACAGCAAATTTTGCCA |
| 1156 | GAGAAGATCACAGCAAATTT |
| 1157 | CATGGAATGAGAAGATCACA |
| 1158 | GGTGAGCATGGAATGAGAAG |
| 1159 | TTTAGAGGAGGTGAGCATGG |
| 1160 | GCTTTGTTTTTAGAGGAGGT |
| 1161 | ATGAGTTGCTTTGTTTTTAG |
| 1162 | GTTGAATGAGTTGCTTTGTT |
| 1163 | GGATGAGTAGGAAGTTGAAT |
| 1164 | GGAGAGGATGAGTAGGAAGT |
| 1165 | TGCGTGGGAAGTTTAAAAAA |
| 1166 | CTTATTGCGTGGGAAGTTTA |
| 1167 | CGTTTCTTATTGCGTGGGAA |
| 1168 | CTCTGAGAGCCACACGTTTC |
| 1169 | GCCTGGGCCTCTGAGAGCCA |
| 1170 | AGGTCAGCCTGGGCCTCTGA |
| 1171 | GTGGTCAGGTCAGCCTGGGC |
| 1172 | TGGGAGTGGTCAGGTCAGCC |
| 1173 | TTTGGGCTGGGAGTGGTCAG |
| 1174 | GATTAGCTTTGGGCTGGGAG |
| 1175 | GTGGTAAGATTAGCTTTGGG |
| 1176 | GAGGAAGTGGGAGTGGTAAG |
| 1177 | TCACAGCAGAGGGAGGAAGT |
| 1178 | AGTAATTCACAGCAGAGGGA |
| 1179 | TTTTAAGTAATTCACAGCAG |
| 1180 | GGTATTTTAGAAATTTTAAG |
| 1181 | GGGTTAAAGGTATTTTAGAA |
| 1182 | GTGGAAACGGAAGGGTTAAA |
| 1183 | AGGTGGTGGAAACGGAAGGG |
| 1184 | ATCAGGTAAGTTCCTGAAGT |
| 1185 | GTCTAATTTAGAAGACAGAA |
| 1186 | TAGATGAGGTCTAATTTAGA |
| 1187 | GACAGAAGTGAGGCATCA |
| 1188 | GTGAGGCATCAGGTAAGT |
| 1189 | GAGGCATCAGGTAAGTTC |
| 1190 | GCATCAGGTAAGTTCCTG |
| 1191 | TCCTGAAGTGGAGGTGGT |
| 1192 | CCTGAAGTGGAGGTGGTG |
| 1193 | GTCTAATTTAGAAGACAGA |
| 1194 | GAAGACAGAAGTGAGGCAT |
| 1195 | AGACAGAAGTGAGGCATCA |
| 1196 | GACAGAAGTGAGGCATCAG |
| 1197 | AAGTGAGGCATCAGGTAAG |
| 1198 | AGTGAGGCATCAGGTAAGT |
| 1199 | GTGAGGCATCAGGTAAGTT |
| 1200 | TGAGGCATCAGGTAAGTTC |
| 1201 | GAGGCATCAGGTAAGTTCC |
| 1202 | GGCATCAGGTAAGTTCCTG |
| 1203 | GCATCAGGTAAGTTCCTGA |
| 1204 | ATCAGGTAAGTTCCTGAAG |
| 1205 | TCAGGTAAGTTCCTGAAGT |
| 1206 | GTAAGTTCCTGAAGTGGAG |
| 1207 | AAGTTCCTGAAGTGGAGGT |
| 1208 | GTTCCTGAAGTGGAGGTGG |
| 1209 | TTCCTGAAGTGGAGGTGGT |
| 1210 | TCCTGAAGTGGAGGTGGTG |
| 1211 | CCTGAAGTGGAGGTGGTGG |
| 1212 | TGAGGTCTAATTTAGAAGAC |
| 1213 | GAGGTCTAATTTAGAAGACA |
| 1214 | AGGTCTAATTTAGAAGACAG |
| 1215 | GGTCTAATTTAGAAGACAGA |
| 1216 | AGAAGACAGAAGTGAGGCAT |
| 1217 | GAAGACAGAAGTGAGGCATC |
| 1218 | AAGACAGAAGTGAGGCATCA |
| 1219 | AGACAGAAGTGAGGCATCAG |
| 1220 | GACAGAAGTGAGGCATCAGG |
| 1221 | ACAGAAGTGAGGCATCAGGT |
| 1222 | GAAGTGAGGCATCAGGTAAG |
| 1223 | AAGTGAGGCATCAGGTAAGT |
| 1224 | AGTGAGGCATCAGGTAAGTT |
| 1225 | GTGAGGCATCAGGTAAGTTC |
| 1226 | TGAGGCATCAGGTAAGTTCC |
| 1227 | GAGGCATCAGGTAAGTTCCT |
| 1228 | AGGCATCAGGTAAGTTCCTG |
| 1229 | GGCATCAGGTAAGTTCCTGA |
| 1230 | GCATCAGGTAAGTTCCTGAA |
| 1231 | CATCAGGTAAGTTCCTGAAG |
| 1232 | TCAGGTAAGTTCCTGAAGTG |
| 1233 | CAGGTAAGTTCCTGAAGTGG |
| 1234 | GGTAAGTTCCTGAAGTGGAG |
| 1235 | GTAAGTTCCTGAAGTGGAGG |
| 1236 | TAAGTTCCTGAAGTGGAGGT |
| 1237 | AAGTTCCTGAAGTGGAGGTG |
| 1238 | AGTTCCTGAAGTGGAGGTGG |
| 1239 | GTTCCTGAAGTGGAGGTGGT |
| 1240 | TTCCTGAAGTGGAGGTGGTG |
| 1241 | TCCTGAAGTGGAGGTGGTGG |
| 1242 | CCTGAAGTGGAGGTGGTGGA |
| 1243 | CTGAAGTGGAGGTGGTGGAA |
| 1244 | ATGAGGTCTAATTTAGAAGAC |
| 1245 | TGAGGTCTAATTTAGAAGACA |
| 1246 | GAGGTCTAATTTAGAAGACAG |
| 1247 | AGGTCTAATTTAGAAGACAGA |
| 1248 | GGTCTAATTTAGAAGACAGAA |
| 1249 | GTCTAATTTAGAAGACAGAAG |
| 1250 | TCTAATTTAGAAGACAGAAGT |
| 1251 | CTAATTTAGAAGACAGAAGTG |
| 1252 | TAATTTAGAAGACAGAAGTGA |
| 1253 | AATTTAGAAGACAGAAGTGAG |
| 1254 | TAGAAGACAGAAGTGAGGCAT |
| 1255 | AGAAGACAGAAGTGAGGCATC |
| 1256 | GAAGACAGAAGTGAGGCATCA |
| 1257 | AAGACAGAAGTGAGGCATCAG |
| 1258 | AGACAGAAGTGAGGCATCAGG |
| 1259 | GACAGAAGTGAGGCATCAGGT |
| 1260 | ACAGAAGTGAGGCATCAGGTA |
| 1261 | CAGAAGTGAGGCATCAGGTAA |
| 1262 | AGAAGTGAGGCATCAGGTAAG |
| 1263 | GAAGTGAGGCATCAGGTAAGT |
| 1264 | AAGTGAGGCATCAGGTAAGTT |
| 1265 | AGTGAGGCATCAGGTAAGTTC |
| 1266 | GTGAGGCATCAGGTAAGTTCC |
| 1267 | TGAGGCATCAGGTAAGTTCCT |
| 1268 | GAGGCATCAGGTAAGTTCCTG |
| 1269 | AGGCATCAGGTAAGTTCCTGA |
| 1270 | GGCATCAGGTAAGTTCCTGAA |
| 1271 | GCATCAGGTAAGTTCCTGAAG |
| 1272 | CATCAGGTAAGTTCCTGAAGT |
| 1273 | ATCAGGTAAGTTCCTGAAGTG |
| 1274 | TCAGGTAAGTTCCTGAAGTGG |
| 1275 | CAGGTAAGTTCCTGAAGTGGA |
| 1276 | AGGTAAGTTCCTGAAGTGGAG |
| 1277 | GGTAAGTTCCTGAAGTGGAGG |
| 1278 | GTAAGTTCCTGAAGTGGAGGT |
| 1279 | TAAGTTCCTGAAGTGGAGGTG |
| 1280 | AAGTTCCTGAAGTGGAGGTGG |
| 1281 | AGTTCCTGAAGTGGAGGTGGT |
| 1282 | GTTCCTGAAGTGGAGGTGGTG |
| 1283 | TTCCTGAAGTGGAGGTGGTGG |
| 1284 | TCCTGAAGTGGAGGTGGTGGA |
| 1285 | CCTGAAGTGGAGGTGGTGGAA |
| 1286 | CTGAAGTGGAGGTGGTGGAAA |
| 1287 | ATGAGGTCTAATTTAGAAGACA |
| 1288 | TGAGGTCTAATTTAGAAGACAG |
| 1289 | GAGGTCTAATTTAGAAGACAGA |
| 1290 | AGGTCTAATTTAGAAGACAGAA |
| 1291 | GGTCTAATTTAGAAGACAGAAG |
| 1292 | GTCTAATTTAGAAGACAGAAGT |
| 1293 | TCTAATTTAGAAGACAGAAGTG |
| 1294 | CTAATTTAGAAGACAGAAGTGA |
| 1295 | TAATTTAGAAGACAGAAGTGAG |
| 1296 | AATTTAGAAGACAGAAGTGAGG |
| 1297 | ATTTAGAAGACAGAAGTGAGGC |
| 1298 | TTAGAAGACAGAAGTGAGGCAT |
| 1299 | TAGAAGACAGAAGTGAGGCATC |
| 1300 | AGAAGACAGAAGTGAGGCATCA |
| 1301 | GAAGACAGAAGTGAGGCATCAG |
| 1302 | AAGACAGAAGTGAGGCATCAGG |
| 1303 | AGACAGAAGTGAGGCATCAGGT |
| 1304 | GACAGAAGTGAGGCATCAGGTA |
| 1305 | ACAGAAGTGAGGCATCAGGTAA |
| 1306 | CAGAAGTGAGGCATCAGGTAAG |
| 1307 | AGAAGTGAGGCATCAGGTAAGT |
| 1308 | GAAGTGAGGCATCAGGTAAGTT |
| 1309 | AAGTGAGGCATCAGGTAAGTTC |
| 1310 | AGTGAGGCATCAGGTAAGTTCC |
| 1311 | GTGAGGCATCAGGTAAGTTCCT |
| 1312 | TGAGGCATCAGGTAAGTTCCTG |
| 1313 | GAGGCATCAGGTAAGTTCCTGA |
| 1314 | AGGCATCAGGTAAGTTCCTGAA |
| 1315 | GGCATCAGGTAAGTTCCTGAAG |
| 1316 | GCATCAGGTAAGTTCCTGAAGT |
| 1317 | CATCAGGTAAGTTCCTGAAGTG |
| 1318 | ATCAGGTAAGTTCCTGAAGTGG |
| 1319 | TCAGGTAAGTTCCTGAAGTGGA |
| 1320 | CAGGTAAGTTCCTGAAGTGGAG |
| 1321 | AGGTAAGTTCCTGAAGTGGAGG |
| 1322 | GGTAAGTTCCTGAAGTGGAGGT |
| 1323 | GTAAGTTCCTGAAGTGGAGGTG |
| 1324 | TAAGTTCCTGAAGTGGAGGTGG |
| 1325 | AAGTTCCTGAAGTGGAGGTGGT |
| 1326 | AGTTCCTGAAGTGGAGGTGGTG |
| 1327 | GTTCCTGAAGTGGAGGTGGTGG |
| 1328 | TTCCTGAAGTGGAGGTGGTGGA |
| 1329 | TCCTGAAGTGGAGGTGGTGGAA |
| 1330 | CCTGAAGTGGAGGTGGTGGAAA |
| 1331 | CTGAAGTGGAGGTGGTGGAAAC |
| 1332 | TGAAGTGGAGGTGGTGGAAACG |
| 1333 | ATGAGGTCTAATTTAGAAGACAG |
| 1334 | TGAGGTCTAATTTAGAAGACAGA |
| 1335 | GAGGTCTAATTTAGAAGACAGAA |
| 1336 | AGGTCTAATTTAGAAGACAGAAG |
| 1337 | GGTCTAATTTAGAAGACAGAAGT |
| 1338 | GTCTAATTTAGAAGACAGAAGTG |
| 1339 | TCTAATTTAGAAGACAGAAGTGA |
| 1340 | CTAATTTAGAAGACAGAAGTGAG |
| 1341 | TAATTTAGAAGACAGAAGTGAGG |
| 1342 | AATTTAGAAGACAGAAGTGAGGC |
| 1343 | ATTTAGAAGACAGAAGTGAGGCA |
| 1344 | TTTAGAAGACAGAAGTGAGGCAT |
| 1345 | TTAGAAGACAGAAGTGAGGCATC |
| 1346 | TAGAAGACAGAAGTGAGGCATCA |
| 1347 | AGAAGACAGAAGTGAGGCATCAG |
| 1348 | GAAGACAGAAGTGAGGCATCAGG |
| 1349 | AAGACAGAAGTGAGGCATCAGGT |
| 1350 | AGACAGAAGTGAGGCATCAGGTA |
| 1351 | GACAGAAGTGAGGCATCAGGTAA |
| 1352 | ACAGAAGTGAGGCATCAGGTAAG |
| 1353 | CAGAAGTGAGGCATCAGGTAAGT |
| 1354 | AGAAGTGAGGCATCAGGTAAGTT |
| 1355 | GAAGTGAGGCATCAGGTAAGTTC |
| 1356 | AAGTGAGGCATCAGGTAAGTTCC |
| 1357 | AGTGAGGCATCAGGTAAGTTCCT |
| 1358 | GTGAGGCATCAGGTAAGTTCCTG |
| 1359 | TGAGGCATCAGGTAAGTTCCTGA |
| 1360 | GAGGCATCAGGTAAGTTCCTGAA |
| 1361 | AGGCATCAGGTAAGTTCCTGAAG |
| 1362 | GGCATCAGGTAAGTTCCTGAAGT |
| 1363 | GCATCAGGTAAGTTCCTGAAGTG |
| 1364 | CATCAGGTAAGTTCCTGAAGTGG |
| 1365 | ATCAGGTAAGTTCCTGAAGTGGA |
| 1366 | TCAGGTAAGTTCCTGAAGTGGAG |
| 1367 | CAGGTAAGTTCCTGAAGTGGAGG |
| 1368 | AGGTAAGTTCCTGAAGTGGAGGT |
| 1369 | GGTAAGTTCCTGAAGTGGAGGTG |
| 1370 | GTAAGTTCCTGAAGTGGAGGTGG |
| 1371 | TAAGTTCCTGAAGTGGAGGTGGT |
| 1372 | AAGTTCCTGAAGTGGAGGTGGTG |
| 1373 | AGTTCCTGAAGTGGAGGTGGTGG |
| 1374 | GTTCCTGAAGTGGAGGTGGTGGA |
| 1375 | TTCCTGAAGTGGAGGTGGTGGAA |
| 1376 | TCCTGAAGTGGAGGTGGTGGAAA |
| 1377 | CCTGAAGTGGAGGTGGTGGAAAC |
| 1378 | CTGAAGTGGAGGTGGTGGAAACG |
| 1379 | TGAAGTGGAGGTGGTGGAAACGG |
| 1380 | ATGAGGTCTAATTTAGAAGACAGA |
| 1381 | TGAGGTCTAATTTAGAAGACAGAA |
| 1382 | GAGGTCTAATTTAGAAGACAGAAG |
| 1383 | AGGTCTAATTTAGAAGACAGAAGT |
| 1384 | GGTCTAATTTAGAAGACAGAAGTG |
| 1385 | GTCTAATTTAGAAGACAGAAGTGA |
| 1386 | TCTAATTTAGAAGACAGAAGTGAG |
| 1387 | CTAATTTAGAAGACAGAAGTGAGG |
| 1388 | TAATTTAGAAGACAGAAGTGAGGC |
| 1389 | AATTTAGAAGACAGAAGTGAGGCA |
| 1390 | ATTTAGAAGACAGAAGTGAGGCAT |
| 1391 | TTTAGAAGACAGAAGTGAGGCATC |
| 1392 | TTAGAAGACAGAAGTGAGGCATCA |
| 1393 | TAGAAGACAGAAGTGAGGCATCAG |
| 1394 | AGAAGACAGAAGTGAGGCATCAGG |
| 1395 | GAAGACAGAAGTGAGGCATCAGGT |
| 1396 | AAGACAGAAGTGAGGCATCAGGTA |
| 1397 | AGACAGAAGTGAGGCATCAGGTAA |
| 1398 | GACAGAAGTGAGGCATCAGGTAAG |
| 1399 | ACAGAAGTGAGGCATCAGGTAAGT |
| 1400 | CAGAAGTGAGGCATCAGGTAAGTT |
| 1401 | AGAAGTGAGGCATCAGGTAAGTTC |
| 1402 | GAAGTGAGGCATCAGGTAAGTTCC |
| 1403 | AAGTGAGGCATCAGGTAAGTTCCT |
| 1404 | AGTGAGGCATCAGGTAAGTTCCTG |
| 1405 | GTGAGGCATCAGGTAAGTTCCTGA |
| 1406 | TGAGGCATCAGGTAAGTTCCTGAA |
| 1407 | GAGGCATCAGGTAAGTTCCTGAAG |
| 1408 | AGGCATCAGGTAAGTTCCTGAAGT |
| 1409 | GGCATCAGGTAAGTTCCTGAAGTG |
| 1410 | GCATCAGGTAAGTTCCTGAAGTGG |
| 1411 | CATCAGGTAAGTTCCTGAAGTGGA |
| 1412 | ATCAGGTAAGTTCCTGAAGTGGAG |
| 1413 | TCAGGTAAGTTCCTGAAGTGGAGG |
| 1414 | CAGGTAAGTTCCTGAAGTGGAGGT |
| 1415 | AGGTAAGTTCCTGAAGTGGAGGTG |
| 1416 | GGTAAGTTCCTGAAGTGGAGGTGG |
| 1417 | GTAAGTTCCTGAAGTGGAGGTGGT |
| 1418 | TAAGTTCCTGAAGTGGAGGTGGTG |
| 1419 | AAGTTCCTGAAGTGGAGGTGGTGG |
| 1420 | AGTTCCTGAAGTGGAGGTGGTGGA |
| 1421 | GTTCCTGAAGTGGAGGTGGTGGAA |
| 1422 | TTCCTGAAGTGGAGGTGGTGGAAA |
| 1423 | TCCTGAAGTGGAGGTGGTGGAAAC |
| 1424 | CCTGAAGTGGAGGTGGTGGAAACG |
| 1425 | CTGAAGTGGAGGTGGTGGAAACGG |
| 1426 | TGAAGTGGAGGTGGTGGAAACGGA |
| 1427 | ATGAGGTCTAATTTAGAAGACAGAA |
| 1428 | TGAGGTCTAATTTAGAAGACAGAAG |
| 1429 | GAGGTCTAATTTAGAAGACAGAAGT |
| 1430 | AGGTCTAATTTAGAAGACAGAAGTG |
| 1431 | GGTCTAATTTAGAAGACAGAAGTGA |
| 1432 | GTCTAATTTAGAAGACAGAAGTGAG |
| 1433 | TCTAATTTAGAAGACAGAAGTGAGG |
| 1434 | CTAATTTAGAAGACAGAAGTGAGGC |
| 1435 | TAATTTAGAAGACAGAAGTGAGGCA |
| 1436 | AATTTAGAAGACAGAAGTGAGGCAT |
| 1437 | ATTTAGAAGACAGAAGTGAGGCATC |
| 1438 | TTTAGAAGACAGAAGTGAGGCATCA |
| 1439 | TTAGAAGACAGAAGTGAGGCATCAG |
| 1440 | TAGAAGACAGAAGTGAGGCATCAGG |
| 1441 | AGAAGACAGAAGTGAGGCATCAGGT |
| 1442 | GAAGACAGAAGTGAGGCATCAGGTA |
| 1443 | AAGACAGAAGTGAGGCATCAGGTAA |
| 1444 | AGACAGAAGTGAGGCATCAGGTAAG |
| 1445 | GACAGAAGTGAGGCATCAGGTAAGT |
| 1446 | ACAGAAGTGAGGCATCAGGTAAGTT |
| 1447 | CAGAAGTGAGGCATCAGGTAAGTTC |
| 1448 | AGAAGTGAGGCATCAGGTAAGTTCC |
| 1449 | GAAGTGAGGCATCAGGTAAGTTCCT |
| 1450 | AAGTGAGGCATCAGGTAAGTTCCTG |
| 1451 | AGTGAGGCATCAGGTAAGTTCCTGA |
| 1452 | GTGAGGCATCAGGTAAGTTCCTGAA |
| 1453 | TGAGGCATCAGGTAAGTTCCTGAAG |
| 1454 | GAGGCATCAGGTAAGTTCCTGAAGT |
| 1455 | AGGCATCAGGTAAGTTCCTGAAGTG |
| 1456 | GGCATCAGGTAAGTTCCTGAAGTGG |
| 1457 | GCATCAGGTAAGTTCCTGAAGTGGA |
| 1458 | CATCAGGTAAGTTCCTGAAGTGGAG |
| 1459 | ATCAGGTAAGTTCCTGAAGTGGAGG |
| 1460 | TCAGGTAAGTTCCTGAAGTGGAGGT |
| 1461 | CAGGTAAGTTCCTGAAGTGGAGGTG |
| 1462 | AGGTAAGTTCCTGAAGTGGAGGTGG |
| 1463 | GGTAAGTTCCTGAAGTGGAGGTGGT |
| 1464 | GTAAGTTCCTGAAGTGGAGGTGGTG |
| 1465 | TAAGTTCCTGAAGTGGAGGTGGTGG |
| 1466 | AAGTTCCTGAAGTGGAGGTGGTGGA |
| 1467 | AGTTCCTGAAGTGGAGGTGGTGGAA |
| 1468 | GTTCCTGAAGTGGAGGTGGTGGAAA |
| 1469 | TTCCTGAAGTGGAGGTGGTGGAAAC |
| 1470 | TCCTGAAGTGGAGGTGGTGGAAACG |
| 1471 | CCTGAAGTGGAGGTGGTGGAAACGG |
| 1472 | CTGAAGTGGAGGTGGTGGAAACGGA |
| 1473 | ATGAGGTCTAATTTAGAAGACAGAAG |
| 1474 | TGAGGTCTAATTTAGAAGACAGAAGT |
| 1475 | GAGGTCTAATTTAGAAGACAGAAGTG |
| 1476 | AGGTCTAATTTAGAAGACAGAAGTGA |
| 1477 | GGTCTAATTTAGAAGACAGAAGTGAG |
| 1478 | GTCTAATTTAGAAGACAGAAGTGAGG |
| 1479 | TCTAATTTAGAAGACAGAAGTGAGGC |
| 1480 | CTAATTTAGAAGACAGAAGTGAGGCA |
| 1481 | TAATTTAGAAGACAGAAGTGAGGCAT |
| 1482 | AATTTAGAAGACAGAAGTGAGGCATC |
| 1483 | ATTTAGAAGACAGAAGTGAGGCATCA |
| 1484 | TTTAGAAGACAGAAGTGAGGCATCAG |
| 1485 | TTAGAAGACAGAAGTGAGGCATCAGG |
| 1486 | TAGAAGACAGAAGTGAGGCATCAGGT |
| 1487 | AGAAGACAGAAGTGAGGCATCAGGTA |
| 1488 | GAAGACAGAAGTGAGGCATCAGGTAA |
| 1489 | AAGACAGAAGTGAGGCATCAGGTAAG |
| 1490 | AGACAGAAGTGAGGCATCAGGTAAGT |
| 1491 | GACAGAAGTGAGGCATCAGGTAAGTT |
| 1492 | ACAGAAGTGAGGCATCAGGTAAGTTC |
| 1493 | CAGAAGTGAGGCATCAGGTAAGTTCC |
| 1494 | AGAAGTGAGGCATCAGGTAAGTTCCT |
| 1495 | GAAGTGAGGCATCAGGTAAGTTCCTG |
| 1496 | AAGTGAGGCATCAGGTAAGTTCCTGA |
| 1497 | AGTGAGGCATCAGGTAAGTTCCTGAA |
| 1498 | GTGAGGCATCAGGTAAGTTCCTGAAG |
| 1499 | TGAGGCATCAGGTAAGTTCCTGAAGT |
| 1500 | GAGGCATCAGGTAAGTTCCTGAAGTG |
| 1501 | AGGCATCAGGTAAGTTCCTGAAGTGG |
| 1502 | GGCATCAGGTAAGTTCCTGAAGTGGA |
| 1503 | GCATCAGGTAAGTTCCTGAAGTGGAG |
| 1504 | CATCAGGTAAGTTCCTGAAGTGGAGG |
| 1505 | ATCAGGTAAGTTCCTGAAGTGGAGGT |
| 1506 | TCAGGTAAGTTCCTGAAGTGGAGGTG |
| 1507 | CAGGTAAGTTCCTGAAGTGGAGGTGG |
| 1508 | AGGTAAGTTCCTGAAGTGGAGGTGGT |
| 1509 | GGTAAGTTCCTGAAGTGGAGGTGGTG |
| 1510 | GTAAGTTCCTGAAGTGGAGGTGGTGG |
| 1511 | TAAGTTCCTGAAGTGGAGGTGGTGGA |
| 1512 | AAGTTCCTGAAGTGGAGGTGGTGGAA |
| 1513 | AGTTCCTGAAGTGGAGGTGGTGGAAA |
| 1514 | GTTCCTGAAGTGGAGGTGGTGGAAAC |
| 1515 | TTCCTGAAGTGGAGGTGGTGGAAACG |
| 1516 | TCCTGAAGTGGAGGTGGTGGAAACGG |
| 1517 | CCTGAAGTGGAGGTGGTGGAAACGGA |

TABLE 5
Exemplary ASOs that target regRNA RR63_v1 and
RR63_v2

| SEQ ID | |
|---|---|
| NO | Sequence |
| 1518 | TTCTTAGCATATATTAAATG |
| 1519 | CTTTGTTTCTTAGCATATAT |
| 1520 | ATTTTCTTTGTTTCTTAGCA |
| 1521 | TGCCTTTCTATTTTCTTTGT |
| 1522 | AATAATGCCTTTCTATTTTC |
| 1523 | AGCATCAACCGACAGTGAGC |
| 1524 | CAGTGTTGACACACAGCATC |
| 1525 | ACCCACAGTGTTGACACACA |
| 1526 | GGGTCACCCACAGTGTTGAC |
| 1527 | CAGACTGGGTCACCCACAGT |
| 1528 | ATTCCCAGACTGGGTCACCC |
| 1529 | TAGTCTATTCCCAGACTGGG |
| 1530 | GGCCTCATTTTAGTCTATTC |
| 1531 | GGAAGGGCCTCATTTTAGTC |
| 1532 | ATAGCCCTCAGGGCTGGAAG |
| 1533 | TATTTCCCTTCCCTATCAGC |
| 1534 | CGTGTATTTATTTCCCTTCC |
| 1535 | GGGATCACCGTGTATTTATT |
| 1536 | GCCAATGGGATCACCGTGTA |
| 1537 | AGGACTTACGTGGCCAATGG |
| 1538 | GAAGAAAGGACTTACGTGGC |
| 1539 | CCTCTGAAGAAAGGACTTAC |
| 1540 | TCTACCTCAACGGTGCCTCT |
| 1541 | ATTCTTTAGTCCTCTACCTC |
| 1542 | TCCTAAGCAATTCTTTAGTC |
| 1543 | AGTTAACTTTGGTGTTACAT |
| 1544 | TTGCAGAAATCAAATACTGG |
| 1545 | GTTTCATTGCAGAAATCAAA |
| 1546 | GCCCAAGTTTCATTGCAGAA |
| 1547 | ACAATTGCCATAAAATGCCC |
| 1548 | TTAAAAGATGCTACAATTGC |
| 1549 | GTGGTTTTAAAAGATGCTAC |
| 1550 | TGCCCATTTTGTGGTTTTAA |
| 1551 | GGAAAATGCCCATTTTGTGG |
| 1552 | CTATTTAGGGGGAAAATGCC |
| 1553 | TAAGAAGCTATTTAGGGGGA |
| 1554 | ACTCCTAAAAATGGATTAAG |
| 1555 | ATATTAGGGGATGACTCCTA |
| 1556 | GTGACAAATATTAGGGGATG |
| 1557 | AGAATAATGGTGACAAATAT |
| 1558 | GTACCAAGAATAATGGTGAC |
| 1559 | TCCTAGTACCAAGAATAATG |
| 1560 | ATTTTTGTTTCCTAGTACCA |
| 1561 | GCAAGCCCCTTGAATAATTT |
| 1562 | ACTCCACCCCACTCTAGATT |
| 1563 | TTCTGTTTACACTCCACCCC |
| 1564 | GGAGCTTCTGTTTACACTCC |
| 1565 | TCCCTGTCTAGGAGCTTCTG |
| 1566 | GTTGAAGCCTCCATTTCCCT |
| 1567 | CTCTGGTTGAAGCCTCCATT |
| 1568 | TCTGTAACACTGTGATTGTC |
| 1569 | CCCCCTGCTGTGCTCTGTAA |
| 1570 | CCCTCACTGCTCACCCCCCT |
| 1571 | ACCTCGTCCCCTCACTGCTC |
| 1572 | TTTCTGTGGGCAACCTCGTC |
| 1573 | GTTCTTTTCTGTGGGCAACC |
| 1574 | GTTTAATAGAAGTTCTTTTC |
| 1575 | GAGCTGTTGTTTAATAGAAG |
| 1576 | TTTATGAGCTGTTGTTTAAT |
| 1577 | GAAGTGATAACTTATTTATG |
| 1578 | ACATTTGAAGTGATAACTTA |
| 1579 | ATTAAACATTTGAAGTGATA |
| 1580 | GGTTTTTATTAAACATTTGA |
| 1581 | AGTAGTGGTTTTTATTAAAC |
| 1582 | GGAGTTAGTAGTGGTTTTTA |
| 1583 | TTAATATTAGGAGTTAGTAG |
| 1584 | TACCTAAAACTTTTTAATAT |
| 1585 | TGGTTATACCTAAAACTTTT |
| 1586 | CAAATTATAGTGGTTATACC |
| 1587 | GTTAGAGACAAATTATAGTG |
| 1588 | TAGAGATGTTAGAGACAAAT |
| 1589 | GAGGGGGAATAGCTTTTTAG |
| 1590 | CATTTTGAGGGGGAATAGCT |
| 1591 | GTCAACATTTTGAGGGGGAA |
| 1592 | CAGTATTTGTCAACATTTTG |
| 1593 | AAAGACAGTATTTGTCAACA |
| 1594 | CTGGGAATAAAAGACAGTAT |
| 1595 | TCAGACTGGGAATAAAAGAC |
| 1596 | TTATTCACACTTCAGACTGG |
| 1597 | AAATATTATTCACACTTCAG |
| 1598 | AGATCAAATATTATTCACAC |
| 1599 | TTGAGCACAGAGATCAAATA |
| 1600 | CTAATGGCTTGAGCACAGAG |
| 1601 | TCACATATTGCTAATGGCTT |
| 1602 | CAGTGGGAGTCACATATTGC |
| 1603 | CAAGCCAGTGGGAGTCACAT |
| 1604 | TAGGTCACCCAAGCCAGTGG |
| 1605 | TTTCAGTTTTTAGGTCACCC |
| 1606 | TCTAATTTCAGTTTTTAGGT |
| 1607 | TTTGTTTCTAGGATCTAATT |
| 1608 | GAAAGTTTGTTTCTAGGATC |
| 1609 | TAGAGGGGAGAAAGTTTGTT |
| 1610 | ATGTTTAGAGGGGAGAAAGT |
| 1611 | ATGAGCTGTGGATGCATGTT |
| 1612 | AAAAAATGAGCTGTGGATGC |
| 1613 | CCCGGTTTTCAAAAATATAG |
| 1614 | CCGTACTCATTTCTTCATTG |
| 1615 | CCGACTTTATCTTTTCTCCA |
| 1616 | GCTGGTTTAATGCAGAACTA |
| 1617 | ACCCTTGAAAGCTGGTTTAA |
| 1618 | CAAATTCTACCCTTGAAAGC |
| 1619 | CAATGATCACAAATTCTACC |
| 1620 | CACAGATTCAATGATCACAA |
| 1621 | GATAATCACAGATTCAATGA |
| 1622 | GCTCTGATAATCACAGATTC |
| 1623 | TTCTGTTTGCTCTGATAATC |
| 1624 | TGAAAGCACAATTCTGTTTG |
| 1625 | GCTTTGTGAAAGCACAATTC |
| 1626 | ACTTGGCTTTGTGAAAGCAC |
| 1627 | CTTCTTTTTTAACTTGGCTT |
| 1628 | CAGTGGGCTTCTTTTTTAAC |
| 1629 | AAAAATACCAGTGGGCTTCT |
| 1630 | TGAATAATCTGCTCAAAGTA |
| 1631 | CCGAATAGATTGAATAATCT |
| 1632 | TACAAATGGCCGAATAGATT |
| 1633 | GGGTGTGTGGTACAAATGGC |
| 1634 | TGTACATGGGTGTGTGGTAC |
| 1635 | TTAGAGAGAGAGAGAGTGGT |
| 1636 | TATCAATCTCTTAGAGAGAG |
| 1637 | CTATTTCATGTATCAATCTC |
| 1638 | GCAATGCTATTTCATGTATC |
| 1639 | CTTTATAGCAATGCTATTTC |
| 1640 | GTTGCTGTCTTCTTTATAGC |
| 1641 | CTCTTGGTTGCTGTCTTCTT |
| 1642 | GTATACAATACAGATGACTC |
| 1643 | ACATTGTATACAATACAGAT |
| 1644 | GATTTCACAACATTGTATAC |
| 1645 | GCATTAATGATTTCACAACA |
| 1646 | CAGGATGCATTAATGATTTC |
| 1647 | AGAAACTTACAGGATGCATT |
| 1648 | ACAATACTTGGATAGAAACT |
| 1649 | TCCAGTGTAAACAACGCTAC |
| 1650 | GTCTCTTGTCCAGTGTAAAC |
| 1651 | CATTGGTCTCTTGTCCAGTG |
| 1652 | GGTTTATTAAACATTGGTCT |
| 1653 | GTGTTTCTGGTTTATTAAAC |
| 1654 | TACTTTGTGGAGTGGAGTGT |
| 1655 | CCCTTTAACTCTTACTTTGT |
| 1656 | GTCTCTGCAAATCCATTCCC |
| 1657 | GTAACTTATACTTGTCTCTG |
| 1658 | AGGTAAGTAACTTATACTTG |
| 1659 | ATATTCACAGGTAAGTAACT |
| 1660 | CTCAAATTCATATTCACAGG |
| 1661 | CTCTGGCTTCCTCAAATTCA |
| 1662 | ATTTCCTCTGGCTTCCTCAA |
| 1663 | CAGTGGAGTCCATTATTTCC |
| 1664 | CTCCACAGTGGAGTCCATTA |
| 1665 | CTTTTAACTCTCCACAGTGG |
| 1666 | AGGTTGTGAAACCTTTTAAC |
| 1667 | GTTGGAAAAGGTTGTGAAAC |
| 1668 | ATGAAAACCGAGGTTGGAAA |
| 1669 | CTTTAGAATGATGAAAACCG |
| 1670 | AATTCTGTTCAGTGCTTTAG |
| 1671 | GAAAAAGTTTGAATTCTGTT |
| 1672 | GTTCTTGAAAAAGTTTGAAT |
| 1673 | GATAATGTTCTTGAAAAAGT |
| 1674 | CTTAGGCAAATAGATAATGT |
| 1675 | CATTGATCCTTAGGCAAATA |
| 1676 | GCCCTTAGGGACATTGATCC |
| 1677 | TTGGGCTGCCCTTAGGGACA |
| 1678 | TGTGCTTGGGCTGCCCTTAG |
| 1679 | TGAACTGTGCTTGGGCTGCC |
| 1680 | TGTGTTTGGGGTTATTGCTC |
| 1681 | CACTCTGTGTTTGGGGTTAT |
| 1682 | CCCAAGCACACTCTGTGTTT |
| 1683 | GAGGGTTTCCCAAGCACACT |
| 1684 | CACCCTCAGAGGGTTTCCCA |
| 1685 | GTTGACACCCTCAGAGGGTT |
| 1686 | AGGCCTGTTGACACCCTCAG |
| 1687 | AATTTCCAAGGCCTGTTGAC |
| 1688 | GTGAATCAGCAATTTCCAAG |
| 1689 | CGTTCCAAGGTGAATCAGCA |
| 1690 | ATTTGCCTCTCGTTCCAAGG |
| 1691 | ACTCTGCTCAATTTGCCTCT |
| 1692 | CTGGGCCCACTCTGCTCAAT |
| 1693 | TCTTGCTGGGCCCACTCTGC |
| 1694 | AGGGCTCTTGCTGGGCCCAC |
| 1695 | CTGAATTCCAGGGCTCTTGC |
| 1696 | GGATAGCCTGAATTCCAGGG |
| 1697 | AAATAAGGGTTGGGATAGCC |
| 1698 | AGGCCTGTAAAAAATAAGGG |
| 1699 | ACTACAGGCCTGTAAAAAAT |
| 1700 | TTCACAACTACAGGCCTGTA |
| 1701 | AGTAACTTTTCACAACTACA |
| 1702 | GTTTTTAAGTAACTTTTCAC |
| 1703 | CTTGTTATGTTTTTAAGTAA |
| 1704 | GAGGGGGAAAGTTTAAAGGT |
| 1705 | TTATATTGAGGGGGAAAGTT |
| 1706 | TCCAAGAGCAATCTTTTATA |
| 1707 | GGGATTTTCCAAGAGCAATC |
| 1708 | GCAACCAGGGATTTTCCAAG |
| 1709 | ATCCTGCAACCAGGGATTTT |
| 1710 | TCTGGATCCTGCAACCAGGG |
| 1711 | GGCCAGGAGCATCTGGATCC |
| 1712 | AGCTGGGCCAGGAGCATCTG |
| 1713 | TCTATAGCTGGGCCAGGAGC |
| 1714 | CAAAACTCTATAGCTGGGCC |
| 1715 | GCTGTTTCAAATGTTCTTTT |
| 1716 | TTTGAGCAAGGCTGTTTCAA |
| 1717 | CTCAGACTTTTGAGCAAGGC |
| 1718 | GTGCACTCAGACTTTTGAGC |
| 1719 | AGTTGTCTGTGCACTCAGAC |
| 1720 | GGTGCAAGAGTTGTCTGTGC |
| 1721 | GTCCATGCCAGGGTGCAAGA |
| 1722 | TCATCTGGTGTGTCCATGCC |
| 1723 | ATACAGAGCTTCATCTGGTG |
| 1724 | CATCTTTGCTTATACAGAGC |
| 1725 | AGAAAATCGTTCATCTTTGC |
| 1726 | ACCTTTAGAAAATCGTTCAT |
| 1727 | GACCTGTTCATTTGAACCTT |
| 1728 | ATTTGACTCAAGACCTGTTC |
| 1729 | GCTCCACATGCTTATTTGAC |
| 1730 | GAGGAGCTCCACATGCTTAT |
| 1731 | TATTGGAGGAGCTCCACATG |
| 1732 | CAAATATATTGGAGGAGCTC |
| 1733 | GAGGCAGCACAAATATATTG |
| 1734 | TGGAAAGATTCACAAGAAGG |
| 1735 | GGAAAAATGGAAAGATTCAC |
| 1736 | ACATTGTAGGAAAAATGGAA |
| 1737 | AAAAATAAGAACATTGTAGG |
| 1738 | GCTCAGGCAAAGGAGAAAAA |
| 1739 | TTTAGGGAAAAGTAAGCTCA |
| 1740 | GAGGCATTTAGGGAAAAGTA |
| 1741 | GCCTATTATTATTCATTGCT |
| 1742 | ATGTTGCCTATTATTATTCA |
| 1743 | GTCTTGACCAATGTTGCCTA |
| 1744 | CCAACCAAGTCTTGACCAAT |
| 1745 | CCAGGCACCCAACCAAGTCT |
| 1746 | GTGGGCCAGGCACCCAACCA |
| 1747 | TCAAATACTGGAGTTGTG |
| 1748 | CAAATACTGGAGTTGTGT |
| 1749 | GTTTTGCTTGGTCAAGAG |
| 1750 | GGTCAAGAGGAAAGAACT |
| 1751 | GCAGAAATCAAATACTGGA |
| 1752 | AATCAAATACTGGAGTTGT |
| 1753 | ATCAAATACTGGAGTTGTG |
| 1754 | TCAAATACTGGAGTTGTGT |
| 1755 | CAAATACTGGAGTTGTGTT |
| 1756 | AAATACTGGAGTTGTGTTT |
| 1757 | AGTTGTGTTTTGCTTGGTC |
| 1758 | TGTGTTTTGCTTGGTCAAG |
| 1759 | GTGTTTTGCTTGGTCAAGA |
| 1760 | TGTTTTGCTTGGTCAAGAG |
| 1761 | GTTTTGCTTGGTCAAGAGG |
| 1762 | TTTTGCTTGGTCAAGAGGA |
| 1763 | TGCTTGGTCAAGAGGAAAG |
| 1764 | TTGGTCAAGAGGAAAGAAC |
| 1765 | TGGTCAAGAGGAAAGAACT |
| 1766 | GGTCAAGAGGAAAGAACTG |
| 1767 | AGAGGAAAGAACTGGCCGG |
| 1768 | GAGGAAAGAACTGGCCGGG |
| 1769 | TGCAGAAATCAAATACTGGA |
| 1770 | GCAGAAATCAAATACTGGAG |
| 1771 | CAGAAATCAAATACTGGAGT |
| 1772 | AGAAATCAAATACTGGAGTT |
| 1773 | GAAATCAAATACTGGAGTTG |
| 1774 | AAATCAAATACTGGAGTTGT |
| 1775 | AATCAAATACTGGAGTTGTG |
| 1776 | ATCAAATACTGGAGTTGTGT |
| 1777 | TCAAATACTGGAGTTGTGTT |
| 1778 | CAAATACTGGAGTTGTGTTT |
| 1779 | AAATACTGGAGTTGTGTTTT |
| 1780 | TACTGGAGTTGTGTTTTGCT |
| 1781 | ACTGGAGTTGTGTTTTGCTT |
| 1782 | CTGGAGTTGTGTTTTGCTTG |
| 1783 | TGGAGTTGTGTTTTGCTTGG |
| 1784 | GGAGTTGTGTTTTGCTTGGT |
| 1785 | GAGTTGTGTTTTGCTTGGTC |
| 1786 | AGTTGTGTTTTGCTTGGTCA |
| 1787 | GTTGTGTTTTGCTTGGTCAA |
| 1788 | TTGTGTTTTGCTTGGTCAAG |
| 1789 | TGTGTTTTGCTTGGTCAAGA |
| 1790 | GTGTTTTGCTTGGTCAAGAG |
| 1791 | TGTTTTGCTTGGTCAAGAGG |
| 1792 | GTTTTGCTTGGTCAAGAGGA |
| 1793 | TTTTGCTTGGTCAAGAGGAA |
| 1794 | TTTGCTTGGTCAAGAGGAAA |
| 1795 | TTGCTTGGTCAAGAGGAAAG |
| 1796 | TGCTTGGTCAAGAGGAAAGA |
| 1797 | CTTGGTCAAGAGGAAAGAAC |
| 1798 | TTGGTCAAGAGGAAAGAACT |
| 1799 | TGGTCAAGAGGAAAGAACTG |
| 1800 | GGTCAAGAGGAAAGAACTGG |
| 1801 | GTCAAGAGGAAAGAACTGGC |
| 1802 | TCAAGAGGAAAGAACTGGCC |
| 1803 | CAAGAGGAAAGAACTGGCCG |
| 1804 | AAGAGGAAAGAACTGGCCGG |
| 1805 | AGAGGAAAGAACTGGCCGGG |
| 1806 | GAGGAAAGAACTGGCCGGGC |
| 1807 | TTGCAGAAATCAAATACTGGA |
| 1808 | TGCAGAAATCAAATACTGGAG |
| 1809 | GCAGAAATCAAATACTGGAGT |
| 1810 | CAGAAATCAAATACTGGAGTT |
| 1811 | AGAAATCAAATACTGGAGTTG |
| 1812 | GAAATCAAATACTGGAGTTGT |
| 1813 | AAATCAAATACTGGAGTTGTG |
| 1814 | AATCAAATACTGGAGTTGTGT |
| 1815 | ATCAAATACTGGAGTTGTGTT |
| 1816 | TCAAATACTGGAGTTGTGTTT |
| 1817 | CAAATACTGGAGTTGTGTTTT |
| 1818 | AAATACTGGAGTTGTGTTTTG |
| 1819 | AATACTGGAGTTGTGTTTTGC |
| 1820 | ATACTGGAGTTGTGTTTTGCT |
| 1821 | TACTGGAGTTGTGTTTTGCTT |
| 1822 | ACTGGAGTTGTGTTTTGCTTG |
| 1823 | CTGGAGTTGTGTTTTGCTTGG |
| 1824 | TGGAGTTGTGTTTTGCTTGGT |
| 1825 | GGAGTTGTGTTTTGCTTGGTC |
| 1826 | GAGTTGTGTTTTGCTTGGTCA |
| 1827 | AGTTGTGTTTTGCTTGGTCAA |
| 1828 | GTTGTGTTTTGCTTGGTCAAG |
| 1829 | TTGTGTTTTGCTTGGTCAAGA |
| 1830 | TGTGTTTTGCTTGGTCAAGAG |
| 1831 | GTGTTTTGCTTGGTCAAGAGG |
| 1832 | TGTTTTGCTTGGTCAAGAGGA |
| 1833 | GTTTTGCTTGGTCAAGAGGAA |
| 1834 | TTTTGCTTGGTCAAGAGGAAA |
| 1835 | TTTGCTTGGTCAAGAGGAAAG |
| 1836 | TTGCTTGGTCAAGAGGAAAGA |
| 1837 | TGCTTGGTCAAGAGGAAAGAA |
| 1838 | GCTTGGTCAAGAGGAAAGAAC |
| 1839 | CTTGGTCAAGAGGAAAGAACT |
| 1840 | TTGGTCAAGAGGAAAGAACTG |
| 1841 | TGGTCAAGAGGAAAGAACTGG |
| 1842 | GGTCAAGAGGAAAGAACTGGC |
| 1843 | GTCAAGAGGAAAGAACTGGCC |
| 1844 | TCAAGAGGAAAGAACTGGCCG |
| 1845 | CAAGAGGAAAGAACTGGCCGG |
| 1846 | AAGAGGAAAGAACTGGCCGGG |
| 1847 | AGAGGAAAGAACTGGCCGGGC |
| 1848 | GAGGAAAGAACTGGCCGGGCG |
| 1849 | TTGCAGAAATCAAATACTGGAG |
| 1850 | TGCAGAAATCAAATACTGGAGT |
| 1851 | GCAGAAATCAAATACTGGAGTT |
| 1852 | CAGAAATCAAATACTGGAGTTG |
| 1853 | AGAAATCAAATACTGGAGTTGT |
| 1854 | GAAATCAAATACTGGAGTTGTG |
| 1855 | AAATCAAATACTGGAGTTGTGT |
| 1856 | AATCAAATACTGGAGTTGTGTT |
| 1857 | ATCAAATACTGGAGTTGTGTTT |
| 1858 | TCAAATACTGGAGTTGTGTTTT |
| 1859 | CAAATACTGGAGTTGTGTTTTG |
| 1860 | AAATACTGGAGTTGTGTTTTGC |
| 1861 | AATACTGGAGTTGTGTTTTGCT |
| 1862 | ATACTGGAGTTGTGTTTTGCTT |
| 1863 | TACTGGAGTTGTGTTTTGCTTG |
| 1864 | ACTGGAGTTGTGTTTTGCTTGG |
| 1865 | CTGGAGTTGTGTTTTGCTTGGT |
| 1866 | TGGAGTTGTGTTTTGCTTGGTC |
| 1867 | GGAGTTGTGTTTTGCTTGGTCA |
| 1868 | GAGTTGTGTTTTGCTTGGTCAA |
| 1869 | AGTTGTGTTTTGCTTGGTCAAG |
| 1870 | GTTGTGTTTTGCTTGGTCAAGA |
| 1871 | TTGTGTTTTGCTTGGTCAAGAG |
| 1872 | TGTGTTTTGCTTGGTCAAGAGG |
| 1873 | GTGTTTTGCTTGGTCAAGAGGA |
| 1874 | TGTTTTGCTTGGTCAAGAGGAA |
| 1875 | GTTTTGCTTGGTCAAGAGGAAA |
| 1876 | TTTTGCTTGGTCAAGAGGAAAG |
| 1877 | TTTGCTTGGTCAAGAGGAAAGA |
| 1878 | TTGCTTGGTCAAGAGGAAAGAA |
| 1879 | TGCTTGGTCAAGAGGAAAGAAC |
| 1880 | GCTTGGTCAAGAGGAAAGAACT |
| 1881 | CTTGGTCAAGAGGAAAGAACTG |
| 1882 | TTGGTCAAGAGGAAAGAACTGG |
| 1883 | TGGTCAAGAGGAAAGAACTGGC |
| 1884 | GGTCAAGAGGAAAGAACTGGCC |
| 1885 | GTCAAGAGGAAAGAACTGGCCG |
| 1886 | TCAAGAGGAAAGAACTGGCCGG |
| 1887 | CAAGAGGAAAGAACTGGCCGGG |
| 1888 | AAGAGGAAAGAACTGGCCGGGC |
| 1889 | AGAGGAAAGAACTGGCCGGGCG |
| 1890 | GAGGAAAGAACTGGCCGGGCGC |
| 1891 | TTGCAGAAATCAAATACTGGAGT |
| 1892 | TGCAGAAATCAAATACTGGAGTT |
| 1893 | GCAGAAATCAAATACTGGAGTTG |
| 1894 | CAGAAATCAAATACTGGAGTTGT |
| 1895 | AGAAATCAAATACTGGAGTTGTG |
| 1896 | GAAATCAAATACTGGAGTTGTGT |
| 1897 | AAATCAAATACTGGAGTTGTGTT |
| 1898 | AATCAAATACTGGAGTTGTGTTT |
| 1899 | ATCAAATACTGGAGTTGTGTTTT |
| 1900 | TCAAATACTGGAGTTGTGTTTTG |
| 1901 | CAAATACTGGAGTTGTGTTTTGC |
| 1902 | AAATACTGGAGTTGTGTTTTGCT |
| 1903 | AATACTGGAGTTGTGTTTTGCTT |
| 1904 | ATACTGGAGTTGTGTTTTGCTTG |
| 1905 | TACTGGAGTTGTGTTTTGCTTGG |
| 1906 | ACTGGAGTTGTGTTTTGCTTGGT |
| 1907 | CTGGAGTTGTGTTTTGCTTGGTC |
| 1908 | TGGAGTTGTGTTTTGCTTGGTCA |
| 1909 | GGAGTTGTGTTTTGCTTGGTCAA |
| 1910 | GAGTTGTGTTTTGCTTGGTCAAG |
| 1911 | AGTTGTGTTTTGCTTGGTCAAGA |
| 1912 | GTTGTGTTTTGCTTGGTCAAGAG |
| 1913 | TTGTGTTTTGCTTGGTCAAGAGG |
| 1914 | TGTGTTTTGCTTGGTCAAGAGGA |
| 1915 | GTGTTTTGCTTGGTCAAGAGGAA |
| 1916 | TGTTTTGCTTGGTCAAGAGGAAA |
| 1917 | GTTTTGCTTGGTCAAGAGGAAAG |
| 1918 | TTTTGCTTGGTCAAGAGGAAAGA |
| 1919 | TTTGCTTGGTCAAGAGGAAAGAA |
| 1920 | TTGCTTGGTCAAGAGGAAAGAAC |
| 1921 | TGCTTGGTCAAGAGGAAAGAACT |
| 1922 | GCTTGGTCAAGAGGAAAGAACTG |
| 1923 | CTTGGTCAAGAGGAAAGAACTGG |
| 1924 | TTGGTCAAGAGGAAAGAACTGGC |
| 1925 | TGGTCAAGAGGAAAGAACTGGCC |
| 1926 | GGTCAAGAGGAAAGAACTGGCCG |
| 1927 | GTCAAGAGGAAAGAACTGGCCGG |
| 1928 | TCAAGAGGAAAGAACTGGCCGGG |
| 1929 | CAAGAGGAAAGAACTGGCCGGGC |
| 1930 | AAGAGGAAAGAACTGGCCGGGCG |
| 1931 | AGAGGAAAGAACTGGCCGGGCGC |
| 1932 | GAGGAAAGAACTGGCCGGGCGCG |
| 1933 | TTGCAGAAATCAAATACTGGAGTT |
| 1934 | TGCAGAAATCAAATACTGGAGTTG |
| 1935 | GCAGAAATCAAATACTGGAGTTGT |
| 1936 | CAGAAATCAAATACTGGAGTTGTG |
| 1937 | AGAAATCAAATACTGGAGTTGTGT |
| 1938 | GAAATCAAATACTGGAGTTGTGTT |
| 1939 | AAATCAAATACTGGAGTTGTGTTT |
| 1940 | AATCAAATACTGGAGTTGTGTTTT |
| 1941 | ATCAAATACTGGAGTTGTGTTTTG |
| 1942 | TCAAATACTGGAGTTGTGTTTTGC |
| 1943 | CAAATACTGGAGTTGTGTTTTGCT |
| 1944 | AAATACTGGAGTTGTGTTTTGCTT |
| 1945 | AATACTGGAGTTGTGTTTTGCTTG |
| 1946 | ATACTGGAGTTGTGTTTTGCTTGG |
| 1947 | TACTGGAGTTGTGTTTTGCTTGGT |
| 1948 | ACTGGAGTTGTGTTTTGCTTGGTC |
| 1949 | CTGGAGTTGTGTTTTGCTTGGTCA |
| 1950 | TGGAGTTGTGTTTTGCTTGGTCAA |
| 1951 | GGAGTTGTGTTTTGCTTGGTCAAG |
| 1952 | GAGTTGTGTTTTGCTTGGTCAAGA |
| 1953 | AGTTGTGTTTTGCTTGGTCAAGAG |
| 1954 | GTTGTGTTTTGCTTGGTCAAGAGG |
| 1955 | TTGTGTTTTGCTTGGTCAAGAGGA |
| 1956 | TGTGTTTTGCTTGGTCAAGAGGAA |
| 1957 | GTGTTTTGCTTGGTCAAGAGGAAA |
| 1958 | TGTTTTGCTTGGTCAAGAGGAAAG |
| 1959 | GTTTTGCTTGGTCAAGAGGAAAGA |
| 1960 | TTTTGCTTGGTCAAGAGGAAAGAA |
| 1961 | TTTGCTTGGTCAAGAGGAAAGAAC |
| 1962 | TTGCTTGGTCAAGAGGAAAGAACT |
| 1963 | TGCTTGGTCAAGAGGAAAGAACTG |
| 1964 | GCTTGGTCAAGAGGAAAGAACTGG |
| 1965 | CTTGGTCAAGAGGAAAGAACTGGC |
| 1966 | TTGGTCAAGAGGAAAGAACTGGCC |
| 1967 | TGGTCAAGAGGAAAGAACTGGCCG |
| 1968 | GGTCAAGAGGAAAGAACTGGCCGG |
| 1969 | GTCAAGAGGAAAGAACTGGCCGGG |
| 1970 | TCAAGAGGAAAGAACTGGCCGGGC |
| 1971 | CAAGAGGAAAGAACTGGCCGGGCG |
| 1972 | AAGAGGAAAGAACTGGCCGGGCGC |
| 1973 | AGAGGAAAGAACTGGCCGGGCGCG |
| 1974 | GAGGAAAGAACTGGCCGGGCGCGG |
| 1975 | TTGCAGAAATCAAATACTGGAGTTG |
| 1976 | TGCAGAAATCAAATACTGGAGTTGT |
| 1977 | GCAGAAATCAAATACTGGAGTTGTG |
| 1978 | CAGAAATCAAATACTGGAGTTGTGT |
| 1979 | AGAAATCAAATACTGGAGTTGTGTT |
| 1980 | GAAATCAAATACTGGAGTTGTGTTT |
| 1981 | AAATCAAATACTGGAGTTGTGTTTT |
| 1982 | AATCAAATACTGGAGTTGTGTTTTG |
| 1983 | ATCAAATACTGGAGTTGTGTTTTGC |
| 1984 | TCAAATACTGGAGTTGTGTTTTGCT |
| 1985 | CAAATACTGGAGTTGTGTTTTGCTT |
| 1986 | AAATACTGGAGTTGTGTTTTGCTTG |
| 1987 | AATACTGGAGTTGTGTTTTGCTTGG |
| 1988 | ATACTGGAGTTGTGTTTTGCTTGGT |
| 1989 | TACTGGAGTTGTGTTTTGCTTGGTC |
| 1990 | ACTGGAGTTGTGTTTTGCTTGGTCA |
| 1991 | CTGGAGTTGTGTTTTGCTTGGTCAA |
| 1992 | TGGAGTTGTGTTTTGCTTGGTCAAG |
| 1993 | GGAGTTGTGTTTTGCTTGGTCAAGA |
| 1994 | GAGTTGTGTTTTGCTTGGTCAAGAG |
| 1995 | AGTTGTGTTTTGCTTGGTCAAGAGG |
| 1996 | GTTGTGTTTTGCTTGGTCAAGAGGA |
| 1997 | TTGTGTTTTGCTTGGTCAAGAGGAA |
| 1998 | TGTGTTTTGCTTGGTCAAGAGGAAA |
| 1999 | GTGTTTTGCTTGGTCAAGAGGAAAG |
| 2000 | TGTTTTGCTTGGTCAAGAGGAAAGA |
| 2001 | GTTTTGCTTGGTCAAGAGGAAAGAA |
| 2002 | TTTTGCTTGGTCAAGAGGAAAGAAC |
| 2003 | TTTGCTTGGTCAAGAGGAAAGAACT |
| 2004 | TTGCTTGGTCAAGAGGAAAGAACTG |
| 2005 | TGCTTGGTCAAGAGGAAAGAACTGG |
| 2006 | GCTTGGTCAAGAGGAAAGAACTGGC |
| 2007 | CTTGGTCAAGAGGAAAGAACTGGCC |
| 2008 | TTGGTCAAGAGGAAAGAACTGGCCG |
| 2009 | TGGTCAAGAGGAAAGAACTGGCCGG |
| 2010 | GGTCAAGAGGAAAGAACTGGCCGGG |
| 2011 | GTCAAGAGGAAAGAACTGGCCGGGC |
| 2012 | TCAAGAGGAAAGAACTGGCCGGGCG |
| 2013 | CAAGAGGAAAGAACTGGCCGGGCGC |
| 2014 | AAGAGGAAAGAACTGGCCGGGCGCG |
| 2015 | AGAGGAAAGAACTGGCCGGGCGCGG |
| 2016 | GAGGAAAGAACTGGCCGGGCGCGGT |
| 2017 | TTGCAGAAATCAAATACTGGAGTTGT |
| 2018 | TGCAGAAATCAAATACTGGAGTTGTG |
| 2019 | GCAGAAATCAAATACTGGAGTTGTGT |
| 2020 | CAGAAATCAAATACTGGAGTTGTGTT |
| 2021 | AGAAATCAAATACTGGAGTTGTGTTT |
| 2022 | GAAATCAAATACTGGAGTTGTGTTTT |
| 2023 | AAATCAAATACTGGAGTTGTGTTTTG |
| 2024 | AATCAAATACTGGAGTTGTGTTTTGC |
| 2025 | ATCAAATACTGGAGTTGTGTTTTGCT |
| 2026 | TCAAATACTGGAGTTGTGTTTTGCTT |
| 2027 | CAAATACTGGAGTTGTGTTTTGCTTG |
| 2028 | AAATACTGGAGTTGTGTTTTGCTTGG |
| 2029 | AATACTGGAGTTGTGTTTTGCTTGGT |
| 2030 | ATACTGGAGTTGTGTTTTGCTTGGTC |
| 2031 | TACTGGAGTTGTGTTTTGCTTGGTCA |
| 2032 | ACTGGAGTTGTGTTTTGCTTGGTCAA |
| 2033 | CTGGAGTTGTGTTTTGCTTGGTCAAG |
| 2034 | TGGAGTTGTGTTTTGCTTGGTCAAGA |
| 2035 | GGAGTTGTGTTTTGCTTGGTCAAGAG |
| 2036 | GAGTTGTGTTTTGCTTGGTCAAGAGG |
| 2037 | AGTTGTGTTTTGCTTGGTCAAGAGGA |
| 2038 | GTTGTGTTTTGCTTGGTCAAGAGGAA |
| 2039 | TTGTGTTTTGCTTGGTCAAGAGGAAA |
| 2040 | TGTGTTTTGCTTGGTCAAGAGGAAAG |
| 2041 | GTGTTTTGCTTGGTCAAGAGGAAAGA |
| 2042 | TGTTTTGCTTGGTCAAGAGGAAAGAA |
| 2043 | GTTTTGCTTGGTCAAGAGGAAAGAAC |
| 2044 | TTTTGCTTGGTCAAGAGGAAAGAACT |
| 2045 | TTTGCTTGGTCAAGAGGAAAGAACTG |
| 2046 | TTGCTTGGTCAAGAGGAAAGAACTGG |
| 2047 | TGCTTGGTCAAGAGGAAAGAACTGGC |
| 2048 | GCTTGGTCAAGAGGAAAGAACTGGCC |
| 2049 | CTTGGTCAAGAGGAAAGAACTGGCCG |
| 2050 | TTGGTCAAGAGGAAAGAACTGGCCGG |
| 2051 | TGGTCAAGAGGAAAGAACTGGCCGGG |
| 2052 | GGTCAAGAGGAAAGAACTGGCCGGGC |
| 2053 | GTCAAGAGGAAAGAACTGGCCGGGCG |
| 2054 | TCAAGAGGAAAGAACTGGCCGGGCGC |
| 2055 | CAAGAGGAAAGAACTGGCCGGGCGCG |
| 2056 | AAGAGGAAAGAACTGGCCGGGCGCGG |
| 2057 | AGAGGAAAGAACTGGCCGGGCGCGGT |

TABLE 6
Exemplary ASOs that target regRNA RR63_v2

| SEQ ID | |
|---|---|
| NO | Sequence |
| 2058 | TTCTTAGCATATATTAAATG |
| 2059 | CTTTGTTTCTTAGCATATAT |
| 2060 | ATTTTCTTTGTTTCTTAGCA |
| 2061 | TGCCTTTCTATTTTCTTTGT |
| 2062 | AATAATGCCTTTCTATTTTC |
| 2063 | AGCATCAACCGACAGTGAGC |
| 2064 | CAGTGTTGACACACAGCATC |
| 2065 | ACCCACAGTGTTGACACACA |
| 2066 | GGGTCACCCACAGTGTTGAC |
| 2067 | CAGACTGGGTCACCCACAGT |
| 2068 | ATTCCCAGACTGGGTCACCC |
| 2069 | TAGTCTATTCCCAGACTGGG |
| 2070 | GGCCTCATTTTAGTCTATTC |
| 2071 | GGAAGGGCCTCATTTTAGTC |
| 2072 | ATAGCCCTCAGGGCTGGAAG |
| 2073 | TATTTCCCTTCCCTATCAGC |
| 2074 | CGTGTATTTATTTCCCTTCC |
| 2075 | GGGATCACCGTGTATTTATT |
| 2076 | GCCAATGGGATCACCGTGTA |
| 2077 | AGGACTTACGTGGCCAATGG |
| 2078 | GAAGAAAGGACTTACGTGGC |
| 2079 | CCTCTGAAGAAAGGACTTAC |
| 2080 | TCTACCTCAACGGTGCCTCT |
| 2081 | ATTCTTTAGTCCTCTACCTC |
| 2082 | TCCTAAGCAATTCTTTAGTC |
| 2083 | AGTTAACTTTGGTGTTACAT |
| 2084 | TTGCAGAAATCAAATACTGG |
| 2085 | GTTTCATTGCAGAAATCAAA |
| 2086 | GCCCAAGTTTCATTGCAGAA |
| 2087 | ACAATTGCCATAAAATGCCC |
| 2088 | TTAAAAGATGCTACAATTGC |
| 2089 | GTGGTTTTAAAAGATGCTAC |
| 2090 | TGCCCATTTTGTGGTTTTAA |
| 2091 | GGAAAATGCCCATTTTGTGG |
| 2092 | CTATTTAGGGGGAAAATGCC |
| 2093 | TAAGAAGCTATTTAGGGGGA |
| 2094 | ACTCCTAAAAATGGATTAAG |
| 2095 | ATATTAGGGGATGACTCCTA |
| 2096 | GTGACAAATATTAGGGGATG |
| 2097 | AGAATAATGGTGACAAATAT |
| 2098 | GTACCAAGAATAATGGTGAC |
| 2099 | TCCTAGTACCAAGAATAATG |
| 2100 | ATTTTTGTTTCCTAGTACCA |
| 2101 | GCAAGCCCCTTGAATAATTT |
| 2102 | ACTCCACCCCACTCTAGATT |
| 2103 | TTCTGTTTACACTCCACCCC |
| 2104 | GGAGCTTCTGTTTACACTCC |
| 2105 | TCCCTGTCTAGGAGCTTCTG |
| 2106 | GTTGAAGCCTCCATTTCCCT |
| 2107 | CTCTGGTTGAAGCCTCCATT |
| 2108 | TCTGTAACACTGTGATTGTC |
| 2109 | CCCCCTGCTGTGCTCTGTAA |
| 2110 | CCCTCACTGCTCACCCCCCT |
| 2111 | ACCTCGTCCCCTCACTGCTC |
| 2112 | TTTCTGTGGGCAACCTCGTC |
| 2113 | GTTCTTTTCTGTGGGCAACC |
| 2114 | GTTTAATAGAAGTTCTTTTC |
| 2115 | GAGCTGTTGTTTAATAGAAG |
| 2116 | TTTATGAGCTGTTGTTTAAT |
| 2117 | GAAGTGATAACTTATTTATG |
| 2118 | ACATTTGAAGTGATAACTTA |
| 2119 | ATTAAACATTTGAAGTGATA |
| 2120 | GGTTTTTATTAAACATTTGA |
| 2121 | AGTAGTGGTTTTTATTAAAC |
| 2122 | GGAGTTAGTAGTGGTTTTTA |
| 2123 | TTAATATTAGGAGTTAGTAG |
| 2124 | TACCTAAAACTTTTTAATAT |
| 2125 | TGGTTATACCTAAAACTTTT |
| 2126 | CAAATTATAGTGGTTATACC |
| 2127 | GTTAGAGACAAATTATAGTG |
| 2128 | TAGAGATGTTAGAGACAAAT |
| 2129 | GAGGGGGAATAGCTTTTTAG |
| 2130 | CATTTTGAGGGGGAATAGCT |
| 2131 | GTCAACATTTTGAGGGGGAA |
| 2132 | CAGTATTTGTCAACATTTTG |
| 2133 | AAAGACAGTATTTGTCAACA |
| 2134 | CTGGGAATAAAAGACAGTAT |
| 2135 | TCAGACTGGGAATAAAAGAC |
| 2136 | TTATTCACACTTCAGACTGG |
| 2137 | AAATATTATTCACACTTCAG |
| 2138 | AGATCAAATATTATTCACAC |
| 2139 | TTGAGCACAGAGATCAAATA |
| 2140 | CTAATGGCTTGAGCACAGAG |
| 2141 | TCACATATTGCTAATGGCTT |
| 2142 | CAGTGGGAGTCACATATTGC |
| 2143 | CAAGCCAGTGGGAGTCACAT |
| 2144 | TTAGGTCACCCAAGCCAGTG |
| 2145 | TTTCAGTTTTTAGGTCACCC |
| 2146 | TCTAATTTCAGTTTTTAGGT |
| 2147 | TTTGTTTCTAGGATCTAATT |
| 2148 | GAAAGTTTGTTTCTAGGATC |
| 2149 | TAGAGGGGAGAAAGTTTGTT |
| 2150 | ATGTTTAGAGGGGAGAAAGT |
| 2151 | ATGAGCTGTGGATGCATGTT |
| 2152 | AAAAAATGAGCTGTGGATGC |
| 2153 | CCCGGTTTTCAAAAATATAG |
| 2154 | CCGTACTCATTTCTTCATTG |
| 2155 | CCGACTTTATCTTTTCTCCA |
| 2156 | GCTGGTTTAATGCAGAACTA |
| 2157 | ACCCTTGAAAGCTGGTTTAA |
| 2158 | CAAATTCTACCCTTGAAAGC |
| 2159 | CAATGATCACAAATTCTACC |
| 2160 | CACAGATTCAATGATCACAA |
| 2161 | GATAATCACAGATTCAATGA |
| 2162 | GCTCTGATAATCACAGATTC |
| 2163 | TTCTGTTTGCTCTGATAATC |
| 2164 | TGAAAGCACAATTCTGTTTG |
| 2165 | GCTTTGTGAAAGCACAATTC |
| 2166 | ACTTGGCTTTGTGAAAGCAC |
| 2167 | CTTCTTTTTTAACTTGGCTT |
| 2168 | CAGTGGGCTTCTTTTTTAAC |
| 2169 | AAAAATACCAGTGGGCTTCT |
| 2170 | TGAATAATCTGCTCAAAGTA |
| 2171 | CCGAATAGATTGAATAATCT |
| 2172 | TACAAATGGCCGAATAGATT |
| 2173 | GGGTGTGTGGTACAAATGGC |
| 2174 | TGTACATGGGTGTGTGGTAC |
| 2175 | TTAGAGAGAGAGAGAGTGGT |
| 2176 | TATCAATCTCTTAGAGAGAG |
| 2177 | CTATTTCATGTATCAATCTC |
| 2178 | GCAATGCTATTTCATGTATC |
| 2179 | CTTTATAGCAATGCTATTTC |
| 2180 | GTTGCTGTCTTCTTTATAGC |
| 2181 | CTCTTGGTTGCTGTCTTCTT |
| 2182 | GTATACAATACAGATGACTC |
| 2183 | ACATTGTATACAATACAGAT |
| 2184 | GATTTCACAACATTGTATAC |
| 2185 | GCATTAATGATTTCACAACA |
| 2186 | CAGGATGCATTAATGATTTC |
| 2187 | AGAAACTTACAGGATGCATT |
| 2188 | ACAATACTTGGATAGAAACT |
| 2189 | TCCAGTGTAAACAACGCTAC |
| 2190 | GTCTCTTGTCCAGTGTAAAC |
| 2191 | CATTGGTCTCTTGTCCAGTG |
| 2192 | GGTTTATTAAACATTGGTCT |
| 2193 | GTGTTTCTGGTTTATTAAAC |
| 2194 | TACTTTGTGGAGTGGAGTGT |
| 2195 | CCCTTTAACTCTTACTTTGT |
| 2196 | GTCTCTGCAAATCCATTCCC |
| 2197 | GTAACTTATACTTGTCTCTG |
| 2198 | AGGTAAGTAACTTATACTTG |
| 2199 | ATATTCACAGGTAAGTAACT |
| 2200 | CTCAAATTCATATTCACAGG |
| 2201 | CTCTGGCTTCCTCAAATTCA |
| 2202 | ATTTCCTCTGGCTTCCTCAA |
| 2203 | CAGTGGAGTCCATTATTTCC |
| 2204 | CTCCACAGTGGAGTCCATTA |
| 2205 | CTTTTAACTCTCCACAGTGG |
| 2206 | AGGTTGTGAAACCTTTTAAC |
| 2207 | GTTGGAAAAGGTTGTGAAAC |
| 2208 | ATGAAAACCGAGGTTGGAAA |
| 2209 | CTTTAGAATGATGAAAACCG |
| 2210 | AATTCTGTTCAGTGCTTTAG |
| 2211 | GAAAAAGTTTGAATTCTGTT |
| 2212 | GTTCTTGAAAAAGTTTGAAT |
| 2213 | GATAATGTTCTTGAAAAAGT |
| 2214 | CTTAGGCAAATAGATAATGT |
| 2215 | CATTGATCCTTAGGCAAATA |
| 2216 | GCCCTTAGGGACATTGATCC |
| 2217 | TTGGGCTGCCCTTAGGGACA |
| 2218 | TGTGCTTGGGCTGCCCTTAG |
| 2219 | TGAACTGTGCTTGGGCTGCC |
| 2220 | TGTGTTTGGGGTTATTGCTC |
| 2221 | CACTCTGTGTTTGGGGTTAT |
| 2222 | CCCAAGCACACTCTGTGTTT |
| 2223 | GAGGGTTTCCCAAGCACACT |
| 2224 | CACCCTCAGAGGGTTTCCCA |
| 2225 | GTTGACACCCTCAGAGGGTT |
| 2226 | AGGCCTGTTGACACCCTCAG |
| 2227 | AATTTCCAAGGCCTGTTGAC |
| 2228 | GTGAATCAGCAATTTCCAAG |
| 2229 | CGTTCCAAGGTGAATCAGCA |
| 2230 | ATTTGCCTCTCGTTCCAAGG |
| 2231 | ACTCTGCTCAATTTGCCTCT |
| 2232 | CTGGGCCCACTCTGCTCAAT |
| 2233 | TCTTGCTGGGCCCACTCTGC |
| 2234 | AGGGCTCTTGCTGGGCCCAC |
| 2235 | CTGAATTCCAGGGCTCTTGC |
| 2236 | GGATAGCCTGAATTCCAGGG |
| 2237 | AAATAAGGGTTGGGATAGCC |
| 2238 | AGGCCTGTAAAAAATAAGGG |
| 2239 | ACTACAGGCCTGTAAAAAAT |
| 2240 | TTCACAACTACAGGCCTGTA |
| 2241 | AGTAACTTTTCACAACTACA |
| 2242 | GTTTTTAAGTAACTTTTCAC |
| 2243 | CTTGTTATGTTTTTAAGTAA |
| 2244 | GAGGGGGAAAGTTTAAAGGT |
| 2245 | TTATATTGAGGGGGAAAGTT |
| 2246 | TCCAAGAGCAATCTTTTATA |
| 2247 | GGGATTTTCCAAGAGCAATC |
| 2248 | GCAACCAGGGATTTTCCAAG |
| 2249 | ATCCTGCAACCAGGGATTTT |
| 2250 | TCTGGATCCTGCAACCAGGG |
| 2251 | GGCCAGGAGCATCTGGATCC |
| 2252 | AGCTGGGCCAGGAGCATCTG |
| 2253 | TCTATAGCTGGGCCAGGAGC |
| 2254 | CAAAACTCTATAGCTGGGCC |
| 2255 | GCTGTTTCAAATGTTCTTTT |
| 2256 | TTTGAGCAAGGCTGTTTCAA |
| 2257 | CTCAGACTTTTGAGCAAGGC |
| 2258 | GTGCACTCAGACTTTTGAGC |
| 2259 | AGTTGTCTGTGCACTCAGAC |
| 2260 | GGTGCAAGAGTTGTCTGTGC |
| 2261 | GTCCATGCCAGGGTGCAAGA |
| 2262 | TCATCTGGTGTGTCCATGCC |
| 2263 | ATACAGAGCTTCATCTGGTG |
| 2264 | CATCTTTGCTTATACAGAGC |
| 2265 | AGAAAATCGTTCATCTTTGC |
| 2266 | ACCTTTAGAAAATCGTTCAT |
| 2267 | GACCTGTTCATTTGAACCTT |
| 2268 | ATTTGACTCAAGACCTGTTC |
| 2269 | GCTCCACATGCTTATTTGAC |
| 2270 | GAGGAGCTCCACATGCTTAT |
| 2271 | TATTGGAGGAGCTCCACATG |
| 2272 | CAAATATATTGGAGGAGCTC |
| 2273 | GAGGCAGCACAAATATATTG |
| 2274 | TGGAAAGATTCACAAGAAGG |
| 2275 | GGAAAAATGGAAAGATTCAC |
| 2276 | ACATTGTAGGAAAAATGGAA |
| 2277 | AAAAATAAGAACATTGTAGG |
| 2278 | GCTCAGGCAAAGGAGAAAAA |
| 2279 | TTTAGGGAAAAGTAAGCTCA |
| 2280 | GAGGCATTTAGGGAAAAGTA |
| 2281 | GCCTATTATTATTCATTGCT |
| 2282 | ATGTTGCCTATTATTATTCA |
| 2283 | GTCTTGACCAATGTTGCCTA |
| 2284 | CCAACCAAGTCTTGACCAAT |
| 2285 | CCAGGCACCCAACCAAGTCT |
| 2286 | AAGTGGGCCAGGCACCCAAC |
| 2287 | TTTTTGAAGTGGGCCAGGCA |
| 2288 | TAACATTTTTGAAGTGGGCC |
| 2289 | GAGGTGATACAAATAACATT |
| 2290 | TAGGGCTGTTGAGAGGCCCA |
| 2291 | ACTCCTAGGGCTGTTGAGAG |
| 2292 | CACCCAACTCCTAGGGCTGT |
| 2293 | TAGAAATGACATGATAGCAC |
| 2294 | CCCAACTATAAAATAGAAAT |
| 2295 | ACATCTACTAGTTGTTACAC |
| 2296 | GCATGTGGCTTCACATCTAC |
| 2297 | TAGCACAGACTGGCATGTGG |
| 2298 | GAAGGTTAGCACAGACTGGC |
| 2299 | GAGTGGAAGAAGGTTAGCAC |
| 2300 | TCAGAGCACAGAGTGGAAGA |
| 2301 | CAATTGCATTTCAGAGCACA |
| 2302 | GCCCATCAATTGCATTTCAG |
| 2303 | AATTTCTGCAAATTAAGAAG |
| 2304 | ACAGTTTAATTTCTGCAAAT |
| 2305 | ATTTGATCTTACAGTTTAAT |
| 2306 | GAGAAAATTTGATCTTACAG |
| 2307 | TTATGACAGAGAAACCTAAA |
| 2308 | ATAAAAAATTTATGACAGAG |

TABLE 7
Exemplary ASOs that target regRNA
RR64_v1 and RR64 v2

| SEQ ID | |
|---|---|
| NO | Sequence |
| 2309 | CAATGTTGCCTGTGTGCACT |
| 2310 | GTCCTTTCAATGTTGCCTGT |
| 2311 | GCCATCTTGGTCCTTTCAAT |
| 2312 | TCAGCAGCCATCTTGGTCCT |
| 2313 | TTCTCTCAGCAGCCATCTTG |
| 2314 | GCCTCTTCTCTCAGCAGCCA |
| 2315 | TTTTTGCCTCTTCTCTCAGC |
| 2316 | TACAAGCCACTTTTTGCCTC |
| 2317 | AAGCAAATTTACAAGCCACT |
| 2318 | CCTACTTAAGCAAATTTACA |
| 2319 | CTTCACCTACTTAAGCAAAT |
| 2320 | GTCTTTCTTCACCTACTTAA |
| 2321 | TCTTTGTCTTTCTTCACCTA |
| 2322 | GCACTGAAAGCCCTTCTTTG |
| 2323 | CTACTGGCACTGAAAGCCCT |
| 2324 | TCATCCTACTGGCACTGAAA |
| 2325 | GCAACTCATCCTACTGGCAC |
| 2326 | ACTGCATGCAACTCATCCTA |
| 2327 | TATCTTAGACTGCATGCAAC |
| 2328 | GTTCTTATCTTAGACTGCAT |
| 2329 | CAGAAGTTCTTATCTTAGAC |
| 2330 | CGTGAACAGAAGTTCTTATC |
| 2331 | GGTGGCCGTGAACAGAAGTT |
| 2332 | CCCTGGGTGGCCGTGAACAG |
| 2333 | AACACTGGCCCTGGGTGGCC |
| 2334 | TTGTAAACACTGGCCCTGGG |
| 2335 | GCTCAGCTTTGTAAACACTG |
| 2336 | CTTCTTGTGGCTCAGCTTTG |
| 2337 | CCCATCCTTCTTGTGGCTCA |
| 2338 | CCTAACCCATCCTTCTTGTG |
| 2339 | TTCCTGCCTAACCCATCCTT |
| 2340 | CAAGACTTCCTGCCTAACCC |
| 2341 | GCATGTGCAAGACTTCCTGC |
| 2342 | TTGGTGTGCATGTGCAAGAC |
| 2343 | TGTGATTGGTGTGCATGTGC |
| 2344 | GCTTCTGTGATTGGTGTGCA |
| 2345 | TAACCAGCTTCTGTGATTGG |
| 2346 | GTGGTAATAACCAGCTTCTG |
| 2347 | TCAGGGTGGTAATAACCAGC |
| 2348 | GATTTTCAGGGTGGTAATAA |
| 2349 | TATATTGATTTTCAGGGTGG |
| 2350 | CAATTTATATTGATTTTCAG |
| 2351 | CTTTACACAATTTATATTGA |
| 2352 | GCTGGCTTTACACAATTTAT |
| 2353 | GACTCATGCTGGCTTTACAC |
| 2354 | GTTAACTGACTCATGCTGGC |
| 2355 | TATATTGTGTTAACTGACTC |
| 2356 | GCCAATTATATTGTGTTAAC |
| 2357 | ACATAGCCAATTATATTGTG |
| 2358 | CAAAAAAACATAGCCAATTA |
| 2359 | TGCCACAAAAAAACATAGCC |
| 2360 | TGCTAGTCTCTATGCCACAA |
| 2361 | TCTCTCTGCTAGTCTCTATG |
| 2362 | GACATTTTTCTCTCTGCTAG |
| 2363 | TCTAATTTAGACATTTTTCT |
| 2364 | GAAAGCTCTAATTTAGACAT |
| 2365 | GCTACCTAAGAAAGCTCTAA |
| 2366 | AATACATAAGCTACCTAAGA |
| 2367 | CACAGCTTGCTTTAAAAATA |
| 2368 | CTTCCACACAGCTTGCTTTA |
| 2369 | GTGTCCTTCCACACAGCTTG |
| 2370 | GAAATTGTGTCCTTCCACAC |
| 2371 | AAACTACAGAAATTGTGTCC |
| 2372 | TGCAGTCAACTAAACTACAG |
| 2373 | CCCTCTGCAGTCAACTAAAC |
| 2374 | TGCCTCCCTCTGCAGTCAAC |
| 2375 | TACCATTCTGCCTCCCTCTG |
| 2376 | CACAAGCCTGTGCTCTTTTC |
| 2377 | GTGACTTCACAAGCCTGTGC |
| 2378 | TTCTTTGTGACTTCACAAGC |
| 2379 | GCCAGTTCTTTGTGACTTCA |
| 2380 | TCTAAAGCCAGTTCTTTGTG |
| 2381 | CCAGGATCTAAAGCCAGTTC |
| 2382 | AATCATCCAACAAGTAAGTG |
| 2383 | TAACCAAATCATCCAACAAG |
| 2384 | ATCACTACCTTAACCAAATC |
| 2385 | GCAAGTATCACTACCTTAAC |
| 2386 | AATTAGCAAGTATCACTACC |
| 2387 | CATGAGGGGAAATAATTAGC |
| 2388 | ACTTCACATGAGGGGAAATA |
| 2389 | ACTGGACTTCACATGAGGGG |
| 2390 | GGCCTACTGGACTTCACATG |
| 2391 | TTCAAGGCCTACTGGACTTC |
| 2392 | CCCTTATTCAAGGCCTACTG |
| 2393 | GATTTCCCCTTATTCAAGGC |
| 2394 | ACACCGATTTCCCCTTATTC |
| 2395 | TTGCCCAACACCGATTTCCC |
| 2396 | GCACCTTTGCCCAACACCGA |
| 2397 | GCAGAGCACCTTTGCCCAAC |
| 2398 | CATGGAGCAGAGCACCTTTG |
| 2399 | TGGTAGAGCTTCTGTCAGCC |
| 2400 | GTTGAGGATGGTAGAGCTTC |
| 2401 | TTAAAAGCCACATGTTGAGG |
| 2402 | CCAAGGAGACCTTAAAAGCC |
| 2403 | CATGTCCAAGGAGACCTTAA |
| 2404 | ATGTCCATGTCCAAGGAGAC |
| 2405 | GATACATGTCCATGTCCAAG |
| 2406 | GTGTGATGGATACATGTCCA |
| 2407 | CTCTTCCCTGTGTGATGGAT |
| 2408 | CTCCATATTTTCTCTTCCCT |
| 2409 | ACAAAATGCTCCATATTTTC |
| 2410 | TCCATACAAAATGCTCCATA |
| 2411 | GAACTTTCCATACAAAATGC |
| 2412 | CCCACAGGAACTTTCCATAC |
| 2413 | GATTGGCCCACAGGAACTTT |
| 2414 | TTCCAGGATTGGCCCACAGG |
| 2415 | GATGCCACTTCCAGGATTGG |
| 2416 | GAGTAGAAGTAATGGATGCC |
| 2417 | AATCTGAGTAGAAGTAATGG |
| 2418 | CTCCAGTGGAATCTGAGTAG |
| 2419 | CAGTCCTCTCCAGTGGAATC |
| 2420 | GTGGCACAGTCCTCTCCAGT |
| 2421 | GGTTATGTGGCACAGTCCTC |
| 2422 | TTAGGTGTGGTTATGTGGCA |
| 2423 | TCTTGCAGTTAGGTGTGGTT |
| 2424 | TCCAATCTTTCTTGCAGTTA |
| 2425 | TGACCTTATCTTCCAATCTT |
| 2426 | ACAGCCTGACCTTATCTTCC |
| 2427 | CCAGACACACAGCCTGACCT |
| 2428 | AAACCTCCCAGACACACAGC |
| 2429 | TTTAACTAAACCTCCCAGAC |
| 2430 | GGTTAACTTTTAACTAAACC |
| 2431 | GAGATTGGTTAACTTTTAAC |
| 2432 | CATCTCTTGAGATTGGTTAA |
| 2433 | AAGACCATCTCTTGAGATTG |
| 2434 | GTGATTTCAAAGACCATCTC |
| 2435 | GTGAACACAAACCTTTGTGA |
| 2436 | CTAGTAAGTGAACACAAACC |
| 2437 | GATAGCTAGTAAGTGAACAC |
| 2438 | GCTAATGGAGATTAAGTAAC |
| 2439 | CTGAGGCTAATGGAGATTAA |
| 2440 | GGTGGTATTCTCACTCCCAT |
| 2441 | CTGTGCAGGTGGTATTCTCA |
| 2442 | ATCATCCTGTGCAGGTGGTA |
| 2443 | AGGCCTCATCATCCTGTGCA |
| 2444 | AAGTTCAGGCAGGCCTCATC |
| 2445 | GGCACAGGGAAGTTCAGGCA |
| 2446 | TCTATGGCACAGGGAAGTTC |
| 2447 | CCCAATCCAGAATCTATGGC |
| 2448 | GGAGGAACTCCCAATCCAGA |
| 2449 | TTGGGGGAGGAACTCCCAAT |
| 2450 | GCTACTTGGGGGAGGAACTC |
| 2451 | TAAATGGCTACTTGGGGGAG |
| 2452 | TCAATTAAATGGCTACTTGG |
| 2453 | ACAATTCAATTAAATGGCTA |
| 2454 | TGGTAGGTAAAAAAATATAC |
| 2455 | TACACTAATTTTGGTAGGTA |
| 2456 | TAGGAATACACTAATTTTGG |
| 2457 | GACAAAATTAGGAATACACT |
| 2458 | GTGTACATGACAAAATTAGG |
| 2459 | CTACATGTGTACATGACAAA |
| 2460 | AGTCTTTTCTACATGTGTAC |
| 2461 | CTTCCAGTCTTTTCTACATG |
| 2462 | GTACTTCTTCCAGTCTTTTC |
| 2463 | ATATTGTACTTCTTCCAGTC |
| 2464 | TTTTTATATTGTACTTCTTC |
| 2465 | AGCACTTTTTATATTGTACT |
| 2466 | CTACAGATAAGCACTTTTTA |
| 2467 | CATAACCTACAGATAAGCAC |
| 2468 | CACATTTGCATAACCTACAG |
| 2469 | CCCTCATTCACATTTGCATA |
| 2470 | TGAAAACCACCCTCATTCAC |
| 2471 | AAAGCATGAGGAAGAAAATG |
| 2472 | GATGCAGAAAAGCATGAGGA |
| 2473 | TTTAGAAGATGCAGAAAAGC |
| 2474 | GTATATAATTTAGAAGATGC |
| 2475 | TACCCTTATTGTATATAATT |
| 2476 | TAGTTTACCCTTATTGTATA |
| 2477 | TAAAAAATAGTTTACCCTTA |
| 2478 | CTTATATGTTTAAAAAATAG |
| 2479 | CATTTAATAACTTATATGTT |
| 2480 | CATTATTTTCATTTAATAAC |
| 2481 | TTCCTTTGTCATATTCATTA |
| 2482 | TTGATATTTCCTTTGTCATA |
| 2483 | GCATTATTATTGATATTTCC |
| 2484 | ATTATGCATTATTATTGATA |
| 2485 | TAATAAAATTTTATTATGCA |
| 2486 | GTATTTCTAAAAATCATTAA |
| 2487 | GTACTCTCTATGTATTTCTA |
| 2488 | ATAGTTGTACTCTCTATGTA |
| 2489 | GGAGAACACCCACATAGTTG |
| 2490 | TATTTGGAGAACACCCACAT |
| 2491 | GCTAATATTTGGAGAACACC |
| 2492 | ACTACAGCTAATATTTGGAG |
| 2493 | GACTGAACTACAGCTAATAT |
| 2494 | GCAATGACTGAACTACAGCT |
| 2495 | TCTGAGTAGAAGTAATGG |
| 2496 | ATCTGAGTAGAAGTAATGG |
| 2497 | TCTGAGTAGAAGTAATGGA |
| 2498 | GAGTAGAAGTAATGGATGC |
| 2499 | AGTAGAAGTAATGGATGCC |
| 2500 | GTAGAAGTAATGGATGCCA |
| 2501 | GATGCCACTTCCAGGATTG |
| 2502 | CACTTCCAGGATTGGCCCA |
| 2503 | ACTTCCAGGATTGGCCCAC |
| 2504 | TTCCAGGATTGGCCCACAG |
| 2505 | AGGATTGGCCCACAGGAAC |
| 2506 | GATTGGCCCACAGGAACTT |
| 2507 | GCCCACAGGAACTTTCCAT |
| 2508 | CCACAGGAACTTTCCATAC |
| 2509 | CACAGGAACTTTCCATACA |
| 2510 | ATCTGAGTAGAAGTAATGGA |
| 2511 | TCTGAGTAGAAGTAATGGAT |
| 2512 | CTGAGTAGAAGTAATGGATG |
| 2513 | TGAGTAGAAGTAATGGATGC |
| 2514 | AGTAGAAGTAATGGATGCCA |
| 2515 | GTAGAAGTAATGGATGCCAC |
| 2516 | TAGAAGTAATGGATGCCACT |
| 2517 | GGATGCCACTTCCAGGATTG |
| 2518 | TGCCACTTCCAGGATTGGCC |
| 2519 | CCACTTCCAGGATTGGCCCA |
| 2520 | CACTTCCAGGATTGGCCCAC |
| 2521 | ACTTCCAGGATTGGCCCACA |
| 2522 | CTTCCAGGATTGGCCCACAG |
| 2523 | CAGGATTGGCCCACAGGAAC |
| 2524 | AGGATTGGCCCACAGGAACT |
| 2525 | GGATTGGCCCACAGGAACTT |
| 2526 | TGGCCCACAGGAACTTTCCA |
| 2527 | GGCCCACAGGAACTTTCCAT |
| 2528 | GCCCACAGGAACTTTCCATA |
| 2529 | CCACAGGAACTTTCCATACA |
| 2530 | CACAGGAACTTTCCATACAA |
| 2531 | ACAGGAACTTTCCATACAAA |
| 2532 | CAGGAACTTTCCATACAAAA |
| 2533 | GGAACTTTCCATACAAAATG |
| 2534 | CTTTCCATACAAAATGCTCC |
| 2535 | GAATCTGAGTAGAAGTAATGG |
| 2536 | AATCTGAGTAGAAGTAATGGA |
| 2537 | ATCTGAGTAGAAGTAATGGAT |
| 2538 | TCTGAGTAGAAGTAATGGATG |
| 2539 | CTGAGTAGAAGTAATGGATGC |
| 2540 | TGAGTAGAAGTAATGGATGCC |
| 2541 | GAGTAGAAGTAATGGATGCCA |
| 2542 | AGTAGAAGTAATGGATGCCAC |
| 2543 | GTAGAAGTAATGGATGCCACT |
| 2544 | TAGAAGTAATGGATGCCACTT |
| 2545 | TAATGGATGCCACTTCCAGGA |
| 2546 | TGGATGCCACTTCCAGGATTG |
| 2547 | GGATGCCACTTCCAGGATTGG |
| 2548 | GATGCCACTTCCAGGATTGGC |
| 2549 | ATGCCACTTCCAGGATTGGCC |
| 2550 | TGCCACTTCCAGGATTGGCCC |
| 2551 | GCCACTTCCAGGATTGGCCCA |
| 2552 | CCACTTCCAGGATTGGCCCAC |
| 2553 | CACTTCCAGGATTGGCCCACA |
| 2554 | ACTTCCAGGATTGGCCCACAG |
| 2555 | CTTCCAGGATTGGCCCACAGG |
| 2556 | TTCCAGGATTGGCCCACAGGA |
| 2557 | CCAGGATTGGCCCACAGGAAC |
| 2558 | CAGGATTGGCCCACAGGAACT |
| 2559 | AGGATTGGCCCACAGGAACTT |
| 2560 | GGATTGGCCCACAGGAACTTT |
| 2561 | GATTGGCCCACAGGAACTTTC |
| 2562 | ATTGGCCCACAGGAACTTTCC |
| 2563 | TTGGCCCACAGGAACTTTCCA |
| 2564 | TGGCCCACAGGAACTTTCCAT |
| 2565 | GGCCCACAGGAACTTTCCATA |
| 2566 | GCCCACAGGAACTTTCCATAC |
| 2567 | CCCACAGGAACTTTCCATACA |
| 2568 | CCACAGGAACTTTCCATACAA |
| 2569 | CACAGGAACTTTCCATACAAA |
| 2570 | ACAGGAACTTTCCATACAAAA |
| 2571 | CAGGAACTTTCCATACAAAAT |
| 2572 | AGGAACTTTCCATACAAAATG |
| 2573 | GGAACTTTCCATACAAAATGC |
| 2574 | GAACTTTCCATACAAAATGCT |
| 2575 | ACTTTCCATACAAAATGCTCC |
| 2576 | GAATCTGAGTAGAAGTAATGGA |
| 2577 | AATCTGAGTAGAAGTAATGGAT |
| 2578 | ATCTGAGTAGAAGTAATGGATG |
| 2579 | TCTGAGTAGAAGTAATGGATGC |
| 2580 | CTGAGTAGAAGTAATGGATGCC |
| 2581 | TGAGTAGAAGTAATGGATGCCA |
| 2582 | GAGTAGAAGTAATGGATGCCAC |
| 2583 | AGTAGAAGTAATGGATGCCACT |
| 2584 | GTAGAAGTAATGGATGCCACTT |
| 2585 | TAGAAGTAATGGATGCCACTTC |
| 2586 | AAGTAATGGATGCCACTTCCAG |
| 2587 | AGTAATGGATGCCACTTCCAGG |
| 2588 | GTAATGGATGCCACTTCCAGGA |
| 2589 | TAATGGATGCCACTTCCAGGAT |
| 2590 | ATGGATGCCACTTCCAGGATTG |
| 2591 | TGGATGCCACTTCCAGGATTGG |
| 2592 | GGATGCCACTTCCAGGATTGGC |
| 2593 | GATGCCACTTCCAGGATTGGCC |
| 2594 | ATGCCACTTCCAGGATTGGCCC |
| 2595 | TGCCACTTCCAGGATTGGCCCA |
| 2596 | GCCACTTCCAGGATTGGCCCAC |
| 2597 | CCACTTCCAGGATTGGCCCACA |
| 2598 | CACTTCCAGGATTGGCCCACAG |
| 2599 | ACTTCCAGGATTGGCCCACAGG |
| 2600 | CTTCCAGGATTGGCCCACAGGA |
| 2601 | TTCCAGGATTGGCCCACAGGAA |
| 2602 | TCCAGGATTGGCCCACAGGAAC |
| 2603 | CCAGGATTGGCCCACAGGAACT |
| 2604 | CAGGATTGGCCCACAGGAACTT |
| 2605 | AGGATTGGCCCACAGGAACTTT |
| 2606 | GGATTGGCCCACAGGAACTTTC |
| 2607 | GATTGGCCCACAGGAACTTTCC |
| 2608 | ATTGGCCCACAGGAACTTTCCA |
| 2609 | TTGGCCCACAGGAACTTTCCAT |
| 2610 | TGGCCCACAGGAACTTTCCATA |
| 2611 | GGCCCACAGGAACTTTCCATAC |
| 2612 | GCCCACAGGAACTTTCCATACA |
| 2613 | CCCACAGGAACTTTCCATACAA |
| 2614 | CCACAGGAACTTTCCATACAAA |
| 2615 | CACAGGAACTTTCCATACAAAA |
| 2616 | ACAGGAACTTTCCATACAAAAT |
| 2617 | CAGGAACTTTCCATACAAAATG |
| 2618 | AGGAACTTTCCATACAAAATGC |
| 2619 | GGAACTTTCCATACAAAATGCT |
| 2620 | GAACTTTCCATACAAAATGCTC |
| 2621 | AACTTTCCATACAAAATGCTCC |
| 2622 | GAATCTGAGTAGAAGTAATGGAT |
| 2623 | AATCTGAGTAGAAGTAATGGATG |
| 2624 | ATCTGAGTAGAAGTAATGGATGC |
| 2625 | TCTGAGTAGAAGTAATGGATGCC |
| 2626 | CTGAGTAGAAGTAATGGATGCCA |
| 2627 | TGAGTAGAAGTAATGGATGCCAC |
| 2628 | GAGTAGAAGTAATGGATGCCACT |
| 2629 | AGTAGAAGTAATGGATGCCACTT |
| 2630 | GTAGAAGTAATGGATGCCACTTC |
| 2631 | TAGAAGTAATGGATGCCACTTCC |
| 2632 | GAAGTAATGGATGCCACTTCCAG |
| 2633 | AAGTAATGGATGCCACTTCCAGG |
| 2634 | AGTAATGGATGCCACTTCCAGGA |
| 2635 | GTAATGGATGCCACTTCCAGGAT |
| 2636 | TAATGGATGCCACTTCCAGGATT |
| 2637 | AATGGATGCCACTTCCAGGATTG |
| 2638 | ATGGATGCCACTTCCAGGATTGG |
| 2639 | TGGATGCCACTTCCAGGATTGGC |
| 2640 | GGATGCCACTTCCAGGATTGGCC |
| 2641 | GATGCCACTTCCAGGATTGGCCC |
| 2642 | ATGCCACTTCCAGGATTGGCCCA |
| 2643 | TGCCACTTCCAGGATTGGCCCAC |
| 2644 | GCCACTTCCAGGATTGGCCCACA |
| 2645 | CCACTTCCAGGATTGGCCCACAG |
| 2646 | CACTTCCAGGATTGGCCCACAGG |
| 2647 | ACTTCCAGGATTGGCCCACAGGA |
| 2648 | CTTCCAGGATTGGCCCACAGGAA |
| 2649 | TTCCAGGATTGGCCCACAGGAAC |
| 2650 | TCCAGGATTGGCCCACAGGAACT |
| 2651 | CCAGGATTGGCCCACAGGAACTT |
| 2652 | CAGGATTGGCCCACAGGAACTTT |
| 2653 | AGGATTGGCCCACAGGAACTTTC |
| 2654 | GGATTGGCCCACAGGAACTTTCC |
| 2655 | GATTGGCCCACAGGAACTTTCCA |
| 2656 | ATTGGCCCACAGGAACTTTCCAT |
| 2657 | TTGGCCCACAGGAACTTTCCATA |
| 2658 | TGGCCCACAGGAACTTTCCATAC |
| 2659 | GGCCCACAGGAACTTTCCATACA |
| 2660 | GCCCACAGGAACTTTCCATACAA |
| 2661 | CCCACAGGAACTTTCCATACAAA |
| 2662 | CCACAGGAACTTTCCATACAAAA |
| 2663 | CACAGGAACTTTCCATACAAAAT |
| 2664 | ACAGGAACTTTCCATACAAAATG |
| 2665 | CAGGAACTTTCCATACAAAATGC |
| 2666 | AGGAACTTTCCATACAAAATGCT |
| 2667 | GGAACTTTCCATACAAAATGCTC |
| 2668 | GAACTTTCCATACAAAATGCTCC |
| 2669 | GAATCTGAGTAGAAGTAATGGATG |
| 2670 | AATCTGAGTAGAAGTAATGGATGC |
| 2671 | ATCTGAGTAGAAGTAATGGATGCC |
| 2672 | TCTGAGTAGAAGTAATGGATGCCA |
| 2673 | CTGAGTAGAAGTAATGGATGCCAC |
| 2674 | TGAGTAGAAGTAATGGATGCCACT |
| 2675 | GAGTAGAAGTAATGGATGCCACTT |
| 2676 | AGTAGAAGTAATGGATGCCACTTC |
| 2677 | GTAGAAGTAATGGATGCCACTTCC |
| 2678 | TAGAAGTAATGGATGCCACTTCCA |
| 2679 | AGAAGTAATGGATGCCACTTCCAG |
| 2680 | GAAGTAATGGATGCCACTTCCAGG |
| 2681 | AAGTAATGGATGCCACTTCCAGGA |
| 2682 | AGTAATGGATGCCACTTCCAGGAT |
| 2683 | GTAATGGATGCCACTTCCAGGATT |
| 2684 | TAATGGATGCCACTTCCAGGATTG |
| 2685 | AATGGATGCCACTTCCAGGATTGG |
| 2686 | ATGGATGCCACTTCCAGGATTGGC |
| 2687 | TGGATGCCACTTCCAGGATTGGCC |
| 2688 | GGATGCCACTTCCAGGATTGGCCC |
| 2689 | GATGCCACTTCCAGGATTGGCCCA |
| 2690 | ATGCCACTTCCAGGATTGGCCCAC |
| 2691 | TGCCACTTCCAGGATTGGCCCACA |
| 2692 | GCCACTTCCAGGATTGGCCCACAG |
| 2693 | CCACTTCCAGGATTGGCCCACAGG |
| 2694 | CACTTCCAGGATTGGCCCACAGGA |
| 2695 | ACTTCCAGGATTGGCCCACAGGAA |
| 2696 | CTTCCAGGATTGGCCCACAGGAAC |
| 2697 | TTCCAGGATTGGCCCACAGGAACT |
| 2698 | TCCAGGATTGGCCCACAGGAACTT |
| 2699 | CCAGGATTGGCCCACAGGAACTTT |
| 2700 | CAGGATTGGCCCACAGGAACTTTC |
| 2701 | AGGATTGGCCCACAGGAACTTTCC |
| 2702 | GGATTGGCCCACAGGAACTTTCCA |
| 2703 | GATTGGCCCACAGGAACTTTCCAT |
| 2704 | ATTGGCCCACAGGAACTTTCCATA |
| 2705 | TTGGCCCACAGGAACTTTCCATAC |
| 2706 | TGGCCCACAGGAACTTTCCATACA |
| 2707 | GGCCCACAGGAACTTTCCATACAA |
| 2708 | GCCCACAGGAACTTTCCATACAAA |
| 2709 | CCCACAGGAACTTTCCATACAAAA |
| 2710 | CCACAGGAACTTTCCATACAAAAT |
| 2711 | CACAGGAACTTTCCATACAAAATG |
| 2712 | ACAGGAACTTTCCATACAAAATGC |
| 2713 | CAGGAACTTTCCATACAAAATGCT |
| 2714 | AGGAACTTTCCATACAAAATGCTC |
| 2715 | GGAACTTTCCATACAAAATGCTCC |
| 2716 | GAATCTGAGTAGAAGTAATGGATGC |
| 2717 | AATCTGAGTAGAAGTAATGGATGCC |
| 2718 | ATCTGAGTAGAAGTAATGGATGCCA |
| 2719 | TCTGAGTAGAAGTAATGGATGCCAC |
| 2720 | CTGAGTAGAAGTAATGGATGCCACT |
| 2721 | TGAGTAGAAGTAATGGATGCCACTT |
| 2722 | GAGTAGAAGTAATGGATGCCACTTC |
| 2723 | AGTAGAAGTAATGGATGCCACTTCC |
| 2724 | GTAGAAGTAATGGATGCCACTTCCA |
| 2725 | TAGAAGTAATGGATGCCACTTCCAG |
| 2726 | AGAAGTAATGGATGCCACTTCCAGG |
| 2727 | GAAGTAATGGATGCCACTTCCAGGA |
| 2728 | AAGTAATGGATGCCACTTCCAGGAT |
| 2729 | AGTAATGGATGCCACTTCCAGGATT |
| 2730 | GTAATGGATGCCACTTCCAGGATTG |
| 2731 | TAATGGATGCCACTTCCAGGATTGG |
| 2732 | AATGGATGCCACTTCCAGGATTGGC |
| 2733 | ATGGATGCCACTTCCAGGATTGGCC |
| 2734 | TGGATGCCACTTCCAGGATTGGCCC |
| 2735 | GGATGCCACTTCCAGGATTGGCCCA |
| 2736 | GATGCCACTTCCAGGATTGGCCCAC |
| 2737 | ATGCCACTTCCAGGATTGGCCCACA |
| 2738 | TGCCACTTCCAGGATTGGCCCACAG |
| 2739 | GCCACTTCCAGGATTGGCCCACAGG |
| 2740 | CCACTTCCAGGATTGGCCCACAGGA |
| 2741 | CACTTCCAGGATTGGCCCACAGGAA |
| 2742 | ACTTCCAGGATTGGCCCACAGGAAC |
| 2743 | CTTCCAGGATTGGCCCACAGGAACT |
| 2744 | TTCCAGGATTGGCCCACAGGAACTT |
| 2745 | TCCAGGATTGGCCCACAGGAACTTT |
| 2746 | CCAGGATTGGCCCACAGGAACTTTC |
| 2747 | CAGGATTGGCCCACAGGAACTTTCC |
| 2748 | AGGATTGGCCCACAGGAACTTTCCA |
| 2749 | GGATTGGCCCACAGGAACTTTCCAT |
| 2750 | GATTGGCCCACAGGAACTTTCCATA |
| 2751 | ATTGGCCCACAGGAACTTTCCATAC |
| 2752 | TTGGCCCACAGGAACTTTCCATACA |
| 2753 | TGGCCCACAGGAACTTTCCATACAA |
| 2754 | GGCCCACAGGAACTTTCCATACAAA |
| 2755 | GCCCACAGGAACTTTCCATACAAAA |
| 2756 | CCCACAGGAACTTTCCATACAAAAT |
| 2757 | CCACAGGAACTTTCCATACAAAATG |
| 2758 | CACAGGAACTTTCCATACAAAATGC |
| 2759 | ACAGGAACTTTCCATACAAAATGCT |
| 2760 | CAGGAACTTTCCATACAAAATGCTC |
| 2761 | AGGAACTTTCCATACAAAATGCTCC |
| 2762 | GAATCTGAGTAGAAGTAATGGATGCC |
| 2763 | AATCTGAGTAGAAGTAATGGATGCCA |
| 2764 | ATCTGAGTAGAAGTAATGGATGCCAC |
| 2765 | TCTGAGTAGAAGTAATGGATGCCACT |
| 2766 | CTGAGTAGAAGTAATGGATGCCACTT |
| 2767 | TGAGTAGAAGTAATGGATGCCACTTC |
| 2768 | GAGTAGAAGTAATGGATGCCACTTCC |
| 2769 | AGTAGAAGTAATGGATGCCACTTCCA |
| 2770 | GTAGAAGTAATGGATGCCACTTCCAG |
| 2771 | TAGAAGTAATGGATGCCACTTCCAGG |
| 2772 | AGAAGTAATGGATGCCACTTCCAGGA |
| 2773 | GAAGTAATGGATGCCACTTCCAGGAT |
| 2774 | AAGTAATGGATGCCACTTCCAGGATT |
| 2775 | AGTAATGGATGCCACTTCCAGGATTG |
| 2776 | GTAATGGATGCCACTTCCAGGATTGG |
| 2777 | TAATGGATGCCACTTCCAGGATTGGC |
| 2778 | AATGGATGCCACTTCCAGGATTGGCC |
| 2779 | ATGGATGCCACTTCCAGGATTGGCCC |
| 2780 | TGGATGCCACTTCCAGGATTGGCCCA |
| 2781 | GGATGCCACTTCCAGGATTGGCCCAC |
| 2782 | GATGCCACTTCCAGGATTGGCCCACA |
| 2783 | ATGCCACTTCCAGGATTGGCCCACAG |
| 2784 | TGCCACTTCCAGGATTGGCCCACAGG |
| 2785 | GCCACTTCCAGGATTGGCCCACAGGA |
| 2786 | CCACTTCCAGGATTGGCCCACAGGAA |
| 2787 | CACTTCCAGGATTGGCCCACAGGAAC |
| 2788 | ACTTCCAGGATTGGCCCACAGGAACT |
| 2789 | CTTCCAGGATTGGCCCACAGGAACTT |
| 2790 | TTCCAGGATTGGCCCACAGGAACTTT |
| 2791 | TCCAGGATTGGCCCACAGGAACTTTC |
| 2792 | CCAGGATTGGCCCACAGGAACTTTCC |
| 2793 | CAGGATTGGCCCACAGGAACTTTCCA |
| 2794 | AGGATTGGCCCACAGGAACTTTCCAT |
| 2795 | GGATTGGCCCACAGGAACTTTCCATA |
| 2796 | GATTGGCCCACAGGAACTTTCCATAC |
| 2797 | ATTGGCCCACAGGAACTTTCCATACA |
| 2798 | TTGGCCCACAGGAACTTTCCATACAA |
| 2799 | TGGCCCACAGGAACTTTCCATACAAA |
| 2800 | GGCCCACAGGAACTTTCCATACAAAA |
| 2801 | GCCCACAGGAACTTTCCATACAAAAT |
| 2802 | CCCACAGGAACTTTCCATACAAAATG |
| 2803 | CCACAGGAACTTTCCATACAAAATGC |
| 2804 | CACAGGAACTTTCCATACAAAATGCT |
| 2805 | ACAGGAACTTTCCATACAAAATGCTC |
| 2806 | CAGGAACTTTCCATACAAAATGCTCC |

TABLE 8

| Exemplary ASOs that target regRNA RR64_v2 | |
|---|---|
| SEQ | |
| ID NO | Sequence |
| 2807 | AAAAAGCAATGACTGAACTA |
| 2808 | TTCCCAGAAAAAAAGCAATG |
| 2809 | GAGTTTTCCCAGAAAAAAAG |
| 2810 | GCAGAAGTCAGAGTTTTCCC |
| 2811 | ATCCCTTCTGCAGAAGTCAG |
| 2812 | GCCCCATCCCTTCTGCAGAA |
| 2813 | ATGACGGCCCCATCCCTTCT |
| 2814 | ATGTCCAGATGACGGCCCCA |
| 2815 | ACTTTGCTTGTGATGTCCAG |
| 2816 | CAGAAACTTTGCTTGTGATG |
| 2817 | TTGAATCCACAGAAACTTTG |
| 2818 | TAATGGGCTTTGAATCCACA |
| 2819 | GTTCTTAATGGGCTTTGAAT |
| 2820 | AGCAAGTTCTTAATGGGCTT |
| 2821 | GTTAGGATAAAGCAAGTTCT |
| 2822 | GGTCTGTGTTAGGATAAAGC |
| 2823 | AGGGCTGGTCTGTGTTAGGA |
| 2824 | CATGACACAGGGCTGGTCTG |
| 2825 | AGGTACCATGACACAGGGCT |
| 2826 | GCAGGAGCATCAGGTACCAT |
| 2827 | ACTGAGCAGGAGCATCAGGT |
| 2828 | GGCACACCACTGAGCAGGAG |
| 2829 | GACATTCAGGGCACACCACT |
| 2830 | GGTTCAGGACATTCAGGGCA |
| 2831 | TACCTCCAGGTTCAGGACAT |
| 2832 | GTGGATCTACCTCCAGGTTC |
| 2833 | GATAGGGTGGATCTACCTCC |
| 2834 | AGAGCTGGGATAGGGTGGAT |
| 2835 | AGCCAGATGAGGCAGAGAGC |
| 2836 | TTGGGAGAGCCAGATGAGGC |
| 2837 | AGCCAGCTTTTGGGAGAGCC |
| 2838 | GTGATAGCCAGCTTTTGGGA |
| 2839 | GGGATCAGTGATAGCCAGCT |
| 2840 | CAAAGGGGATCAGTGATAGC |
| 2841 | GCACTGAGCCAAAGGGGATC |
| 2842 | AACTAGGCACTGAGCCAAAG |
| 2843 | TACCCAGACATGATGTGGAG |
| 2844 | TCCAGGAGCCCTACCCAGAC |
| 2845 | GGAATTCCAGGAGCCCTACC |
| 2846 | CTGAAGGAATTCCAGGAGCC |
| 2847 | GTGAGGCCTGAAGGAATTCC |
| 2848 | CCCACAAGTGAGGCCTGAAG |
| 2849 | TTTTACTCTAAATGGCCCAC |
| 2850 | GCCCACTATTTTACTCTAAA |
| 2851 | GTTGTATGTGCCCACTATTT |
| 2852 | GACCATAATGAAGTGTTGTA |
| 2853 | TTGAAGACCATAATGAAGTG |
| 2854 | CATGGTTTGAAGACCATAAT |
| 2855 | GGAAACATGGTTTGAAGACC |
| 2856 | ATCTTAAAGGAAACATGGTT |
| 2857 | CTTAAGATCATCTTAAAGGA |
| 2858 | TCGTCCTTAAGATCATCTTA |
| 2859 | TCTTACTTTCGTCCTTAAGA |
| 2860 | CACTATTTCTTACTTTCGTC |
| 2861 | CTCAACTCACTATTTCTTAC |
| 2862 | GGACTTACTCAACTCACTAT |
| 2863 | ATAATACATTGGACTTACTC |
| 2864 | AACATTTAATAATACATTGG |
| 2865 | CAGAGGGAGCATAAAACATT |
| 2866 | GACAACTTGCTAGGATTGTA |
| 2867 | ATAAATGACAACTTGCTAGG |
| 2868 | TAACTATAAATGACAACTTG |
| 2869 | TTTAGATAACTATAAATGAC |
| 2870 | GTATTTCATTTAGATAACTA |
| 2871 | TCAATGTATTTCATTTAGAT |
| 2872 | GGAGATCAATGTATTTCATT |
| 2873 | GCTGTGGAGATCAATGTATT |
| 2874 | TACTGAGTGCTGTGGAGATC |
| 2875 | AACCAAGTACTGAGTGCTGT |
| 2876 | ATTCTAACCAAGTACTGAGT |
| 2877 | TATAAATTCTAACCAAGTAC |
| 2878 | AGAACCAAAAATATAAATTC |
| 2879 | ATTAGAGGGAGAACCAAAAA |
| 2880 | TCCTCATTAGAGGGAGAACC |
| 2881 | GCTGGTTTTCCTCATTAGAG |
| 2882 | TATTTTTTGTGCTGGTTTTC |
| 2883 | GTCCATATTTTTTGTGCTGG |
| 2884 | AATGAAGTCCATATTTTTTG |
| 2885 | AGATTTGCTTATGAATGAAG |
| 2886 | AACATCAGAAAAGATTTGCT |
| 2887 | CCGCACTCAAAAACATCAGA |
| 2888 | GAACTACCGCACTCAAAAAC |
| 2889 | GGAAAGACAAGAACTACCGC |
| 2890 | TTCAGGGAAAGACAAGAACT |
| 2891 | GAGCCTTCAGGGAAAGACAA |
| 2892 | AATAATGAGCCTTCAGGGAA |
| 2893 | TGCACAATAATGAGCCTTCA |
| 2894 | TAACTTTATGCACAATAATG |
| 2895 | ATTTTTATAACTTTATGCAC |
| 2896 | GGTACCCTTATAATTTTTAT |
| 2897 | ATTATAAAGGTACCCTTATA |
| 2898 | TCATTTGGCAATTATAAAGG |
| 2899 | TTCTTTTCATTTGGCAATTA |
| 2900 | CCTATTTCTTTTCATTTGGC |
| 2901 | CTTTATTTATTTCACCTATT |
| 2902 | GATTCCTCTTCTTTATTTAT |
| 2903 | CTCTCTGATTCCTCTTCTTT |
| 2904 | GAATTCTCTCTGATTCCTCT |
| 2905 | GTAGCAGAATTCTCTCTGAT |
| 2906 | TTGTTCTGTAGCAGAATTCT |
| 2907 | TTGACTTTTGTTCTGTAGCA |
| 2908 | CTTATAATTGACTTTTGTTC |
| 2909 | GCACAATTACTTATAATTGA |
| 2910 | TGCAGGCACAATTACTTATA |
| 2911 | TCAACACTGCAGGCACAATT |
| 2912 | TGAGTATTCAACACTGCAGG |
| 2913 | AGTTCAAATGAGTATTCAAC |
| 2914 | TCTACAGTTCAAATGAGTAT |
| 2915 | GATAAATTCTACAGTTCAAA |
| 2916 | CGAGTGATAAATTCTACAGT |
| 2917 | GACTTGCCCCTTGCGAGTGA |
| 2918 | AGGCAGACTTGCCCCTTGCG |
| 2919 | CCCCCAGGCAGACTTGCCCC |
| 2920 | CCATACCCCCAGGCAGACTT |
| 2921 | AATCTACCCATACCCCCAGG |
| 2922 | CATGAAAATCCAATCTACCC |
| 2923 | CAAGACATGAAAATCCAATC |
| 2924 | TAAAGCCAAGACATGAAAAT |
| 2925 | CTGGATAAAGCCAAGACATG |
| 2926 | GGAGGTGTCCTGGATAAAGC |
| 2927 | TAAGAAGGGAGGTGTCCTGG |
| 2928 | ACATGACTTTAAGAAGGGAG |
| 2929 | CGACTGAAACATGACTTTAA |
| 2930 | ATAGTTTCCACGACTGAAAC |
| 2931 | AAGGAATAGTTTCCACGACT |
| 2932 | AGCCCTACCCAGACATGA |
| 2933 | GCCCTACCCAGACATGAT |
| 2934 | CCCTACCCAGACATGATG |
| 2935 | CCTACCCAGACATGATGT |
| 2936 | TACCCAGACATGATGTGG |
| 2937 | TGGAGGTGGAGCAAACTA |
| 2938 | GAGGTGGAGCAAACTAGG |
| 2939 | AGGTGGAGCAAACTAGGC |
| 2940 | GGTGGAGCAAACTAGGCA |
| 2941 | GTGGAGCAAACTAGGCAC |
| 2942 | TGGAGCAAACTAGGCACT |
| 2943 | GGAGCAAACTAGGCACTG |
| 2944 | AACTAGGCACTGAGCCAA |
| 2945 | GGCACTGAGCCAAAGGGG |
| 2946 | AGCCAAAGGGGATCAGTG |
| 2947 | GCCAAAGGGGATCAGTGA |
| 2948 | AGGGGATCAGTGATAGCC |
| 2949 | AGCCCTACCCAGACATGAT |
| 2950 | GCCCTACCCAGACATGATG |
| 2951 | CCCTACCCAGACATGATGT |
| 2952 | CCTACCCAGACATGATGTG |
| 2953 | CTACCCAGACATGATGTGG |
| 2954 | TACCCAGACATGATGTGGA |
| 2955 | ATGTGGAGGTGGAGCAAAC |
| 2956 | GTGGAGGTGGAGCAAACTA |
| 2957 | TGGAGGTGGAGCAAACTAG |
| 2958 | GGAGGTGGAGCAAACTAGG |
| 2959 | GAGGTGGAGCAAACTAGGC |
| 2960 | AGGTGGAGCAAACTAGGCA |
| 2961 | GGTGGAGCAAACTAGGCAC |
| 2962 | GTGGAGCAAACTAGGCACT |
| 2963 | TGGAGCAAACTAGGCACTG |
| 2964 | GGAGCAAACTAGGCACTGA |
| 2965 | GAGCAAACTAGGCACTGAG |
| 2966 | AGCAAACTAGGCACTGAGC |
| 2967 | GCAAACTAGGCACTGAGCC |
| 2968 | CAAACTAGGCACTGAGCCA |
| 2969 | AAACTAGGCACTGAGCCAA |
| 2970 | AACTAGGCACTGAGCCAAA |
| 2971 | AGGCACTGAGCCAAAGGGG |
| 2972 | GGCACTGAGCCAAAGGGGA |
| 2973 | GCACTGAGCCAAAGGGGAT |
| 2974 | CTGAGCCAAAGGGGATCAG |
| 2975 | TGAGCCAAAGGGGATCAGT |
| 2976 | GAGCCAAAGGGGATCAGTG |
| 2977 | AGCCAAAGGGGATCAGTGA |
| 2978 | GCCAAAGGGGATCAGTGAT |
| 2979 | CAAAGGGGATCAGTGATAG |
| 2980 | AAAGGGGATCAGTGATAGC |
| 2981 | AAGGGGATCAGTGATAGCC |
| 2982 | AGGGGATCAGTGATAGCCA |
| 2983 | AGCCCTACCCAGACATGATG |
| 2984 | GCCCTACCCAGACATGATGT |
| 2985 | CCCTACCCAGACATGATGTG |
| 2986 | CCTACCCAGACATGATGTGG |
| 2987 | CTACCCAGACATGATGTGGA |
| 2988 | CCCAGACATGATGTGGAGGT |
| 2989 | CAGACATGATGTGGAGGTGG |
| 2990 | ATGATGTGGAGGTGGAGCAA |
| 2991 | TGATGTGGAGGTGGAGCAAA |
| 2992 | GATGTGGAGGTGGAGCAAAC |
| 2993 | ATGTGGAGGTGGAGCAAACT |
| 2994 | TGTGGAGGTGGAGCAAACTA |
| 2995 | GTGGAGGTGGAGCAAACTAG |
| 2996 | TGGAGGTGGAGCAAACTAGG |
| 2997 | GGAGGTGGAGCAAACTAGGC |
| 2998 | GAGGTGGAGCAAACTAGGCA |
| 2999 | AGGTGGAGCAAACTAGGCAC |
| 3000 | GGTGGAGCAAACTAGGCACT |
| 3001 | GTGGAGCAAACTAGGCACTG |
| 3002 | TGGAGCAAACTAGGCACTGA |
| 3003 | GGAGCAAACTAGGCACTGAG |
| 3004 | GAGCAAACTAGGCACTGAGC |
| 3005 | AGCAAACTAGGCACTGAGCC |
| 3006 | GCAAACTAGGCACTGAGCCA |
| 3007 | CAAACTAGGCACTGAGCCAA |
| 3008 | AAACTAGGCACTGAGCCAAA |
| 3009 | TAGGCACTGAGCCAAAGGGG |
| 3010 | AGGCACTGAGCCAAAGGGGA |
| 3011 | GGCACTGAGCCAAAGGGGAT |
| 3012 | CACTGAGCCAAAGGGGATCA |
| 3013 | ACTGAGCCAAAGGGGATCAG |
| 3014 | CTGAGCCAAAGGGGATCAGT |
| 3015 | TGAGCCAAAGGGGATCAGTG |
| 3016 | GAGCCAAAGGGGATCAGTGA |
| 3017 | AGCCAAAGGGGATCAGTGAT |
| 3018 | GCCAAAGGGGATCAGTGATA |
| 3019 | CCAAAGGGGATCAGTGATAG |
| 3020 | AAAGGGGATCAGTGATAGCC |
| 3021 | AAGGGGATCAGTGATAGCCA |
| 3022 | AGCCCTACCCAGACATGATGT |
| 3023 | GCCCTACCCAGACATGATGTG |
| 3024 | CCCTACCCAGACATGATGTGG |
| 3025 | CCTACCCAGACATGATGTGGA |
| 3026 | CTACCCAGACATGATGTGGAG |
| 3027 | TACCCAGACATGATGTGGAGG |
| 3028 | ACCCAGACATGATGTGGAGGT |
| 3029 | CCCAGACATGATGTGGAGGTG |
| 3030 | CCAGACATGATGTGGAGGTGG |
| 3031 | CAGACATGATGTGGAGGTGGA |
| 3032 | CATGATGTGGAGGTGGAGCAA |
| 3033 | ATGATGTGGAGGTGGAGCAAA |
| 3034 | TGATGTGGAGGTGGAGCAAAC |
| 3035 | GATGTGGAGGTGGAGCAAACT |
| 3036 | ATGTGGAGGTGGAGCAAACTA |
| 3037 | TGTGGAGGTGGAGCAAACTAG |
| 3038 | GTGGAGGTGGAGCAAACTAGG |
| 3039 | TGGAGGTGGAGCAAACTAGGC |
| 3040 | GGAGGTGGAGCAAACTAGGCA |
| 3041 | GAGGTGGAGCAAACTAGGCAC |
| 3042 | AGGTGGAGCAAACTAGGCACT |
| 3043 | GGTGGAGCAAACTAGGCACTG |
| 3044 | GTGGAGCAAACTAGGCACTGA |
| 3045 | TGGAGCAAACTAGGCACTGAG |
| 3046 | GGAGCAAACTAGGCACTGAGC |
| 3047 | GAGCAAACTAGGCACTGAGCC |
| 3048 | AGCAAACTAGGCACTGAGCCA |
| 3049 | GCAAACTAGGCACTGAGCCAA |
| 3050 | CAAACTAGGCACTGAGCCAAA |
| 3051 | AAACTAGGCACTGAGCCAAAG |
| 3052 | AACTAGGCACTGAGCCAAAGG |
| 3053 | ACTAGGCACTGAGCCAAAGGG |
| 3054 | CTAGGCACTGAGCCAAAGGGG |
| 3055 | TAGGCACTGAGCCAAAGGGGA |
| 3056 | AGGCACTGAGCCAAAGGGGAT |
| 3057 | GGCACTGAGCCAAAGGGGATC |
| 3058 | GCACTGAGCCAAAGGGGATCA |
| 3059 | CACTGAGCCAAAGGGGATCAG |
| 3060 | ACTGAGCCAAAGGGGATCAGT |
| 3061 | CTGAGCCAAAGGGGATCAGTG |
| 3062 | TGAGCCAAAGGGGATCAGTGA |
| 3063 | GAGCCAAAGGGGATCAGTGAT |
| 3064 | AGCCAAAGGGGATCAGTGATA |
| 3065 | GCCAAAGGGGATCAGTGATAG |
| 3066 | CCAAAGGGGATCAGTGATAGC |
| 3067 | CAAAGGGGATCAGTGATAGCC |
| 3068 | AAAGGGGATCAGTGATAGCCA |
| 3069 | AGCCCTACCCAGACATGATGTG |
| 3070 | GCCCTACCCAGACATGATGTGG |
| 3071 | CCCTACCCAGACATGATGTGGA |
| 3072 | CCTACCCAGACATGATGTGGAG |
| 3073 | CTACCCAGACATGATGTGGAGG |
| 3074 | TACCCAGACATGATGTGGAGGT |
| 3075 | ACCCAGACATGATGTGGAGGTG |
| 3076 | CCCAGACATGATGTGGAGGTGG |
| 3077 | CCAGACATGATGTGGAGGTGGA |
| 3078 | CAGACATGATGTGGAGGTGGAG |
| 3079 | AGACATGATGTGGAGGTGGAGC |
| 3080 | ACATGATGTGGAGGTGGAGCAA |
| 3081 | CATGATGTGGAGGTGGAGCAAA |
| 3082 | ATGATGTGGAGGTGGAGCAAAC |
| 3083 | TGATGTGGAGGTGGAGCAAACT |
| 3084 | GATGTGGAGGTGGAGCAAACTA |
| 3085 | ATGTGGAGGTGGAGCAAACTAG |
| 3086 | TGTGGAGGTGGAGCAAACTAGG |
| 3087 | GTGGAGGTGGAGCAAACTAGGC |
| 3088 | TGGAGGTGGAGCAAACTAGGCA |
| 3089 | GGAGGTGGAGCAAACTAGGCAC |
| 3090 | GAGGTGGAGCAAACTAGGCACT |
| 3091 | AGGTGGAGCAAACTAGGCACTG |
| 3092 | GGTGGAGCAAACTAGGCACTGA |
| 3093 | GTGGAGCAAACTAGGCACTGAG |
| 3094 | TGGAGCAAACTAGGCACTGAGC |
| 3095 | GGAGCAAACTAGGCACTGAGCC |
| 3096 | GAGCAAACTAGGCACTGAGCCA |
| 3097 | AGCAAACTAGGCACTGAGCCAA |
| 3098 | GCAAACTAGGCACTGAGCCAAA |
| 3099 | CAAACTAGGCACTGAGCCAAAG |
| 3100 | AAACTAGGCACTGAGCCAAAGG |
| 3101 | AACTAGGCACTGAGCCAAAGGG |
| 3102 | ACTAGGCACTGAGCCAAAGGGG |
| 3103 | CTAGGCACTGAGCCAAAGGGGA |
| 3104 | TAGGCACTGAGCCAAAGGGGAT |
| 3105 | AGGCACTGAGCCAAAGGGGATC |
| 3106 | GGCACTGAGCCAAAGGGGATCA |
| 3107 | GCACTGAGCCAAAGGGGATCAG |
| 3108 | CACTGAGCCAAAGGGGATCAGT |
| 3109 | ACTGAGCCAAAGGGGATCAGTG |
| 3110 | CTGAGCCAAAGGGGATCAGTGA |
| 3111 | TGAGCCAAAGGGGATCAGTGAT |
| 3112 | GAGCCAAAGGGGATCAGTGATA |
| 3113 | AGCCAAAGGGGATCAGTGATAG |
| 3114 | GCCAAAGGGGATCAGTGATAGC |
| 3115 | CCAAAGGGGATCAGTGATAGCC |
| 3116 | CAAAGGGGATCAGTGATAGCCA |
| 3117 | AGCCCTACCCAGACATGATGTGG |
| 3118 | GCCCTACCCAGACATGATGTGGA |
| 3119 | CCCTACCCAGACATGATGTGGAG |
| 3120 | CCTACCCAGACATGATGTGGAGG |
| 3121 | CTACCCAGACATGATGTGGAGGT |
| 3122 | TACCCAGACATGATGTGGAGGTG |
| 3123 | ACCCAGACATGATGTGGAGGTGG |
| 3124 | CCCAGACATGATGTGGAGGTGGA |
| 3125 | CCAGACATGATGTGGAGGTGGAG |
| 3126 | CAGACATGATGTGGAGGTGGAGC |
| 3127 | AGACATGATGTGGAGGTGGAGCA |
| 3128 | GACATGATGTGGAGGTGGAGCAA |
| 3129 | ACATGATGTGGAGGTGGAGCAAA |
| 3130 | CATGATGTGGAGGTGGAGCAAAC |
| 3131 | ATGATGTGGAGGTGGAGCAAACT |
| 3132 | TGATGTGGAGGTGGAGCAAACTA |
| 3133 | GATGTGGAGGTGGAGCAAACTAG |
| 3134 | ATGTGGAGGTGGAGCAAACTAGG |
| 3135 | TGTGGAGGTGGAGCAAACTAGGC |
| 3136 | GTGGAGGTGGAGCAAACTAGGCA |
| 3137 | TGGAGGTGGAGCAAACTAGGCAC |
| 3138 | GGAGGTGGAGCAAACTAGGCACT |
| 3139 | GAGGTGGAGCAAACTAGGCACTG |
| 3140 | AGGTGGAGCAAACTAGGCACTGA |
| 3141 | GGTGGAGCAAACTAGGCACTGAG |
| 3142 | GTGGAGCAAACTAGGCACTGAGC |
| 3143 | TGGAGCAAACTAGGCACTGAGCC |
| 3144 | GGAGCAAACTAGGCACTGAGCCA |
| 3145 | GAGCAAACTAGGCACTGAGCCAA |
| 3146 | AGCAAACTAGGCACTGAGCCAAA |
| 3147 | GCAAACTAGGCACTGAGCCAAAG |
| 3148 | CAAACTAGGCACTGAGCCAAAGG |
| 3149 | AAACTAGGCACTGAGCCAAAGGG |
| 3150 | AACTAGGCACTGAGCCAAAGGGG |
| 3151 | ACTAGGCACTGAGCCAAAGGGGA |
| 3152 | CTAGGCACTGAGCCAAAGGGGAT |
| 3153 | TAGGCACTGAGCCAAAGGGGATC |
| 3154 | AGGCACTGAGCCAAAGGGGATCA |
| 3155 | GGCACTGAGCCAAAGGGGATCAG |
| 3156 | GCACTGAGCCAAAGGGGATCAGT |
| 3157 | CACTGAGCCAAAGGGGATCAGTG |
| 3158 | ACTGAGCCAAAGGGGATCAGTGA |
| 3159 | CTGAGCCAAAGGGGATCAGTGAT |
| 3160 | TGAGCCAAAGGGGATCAGTGATA |
| 3161 | GAGCCAAAGGGGATCAGTGATAG |
| 3162 | AGCCAAAGGGGATCAGTGATAGC |
| 3163 | GCCAAAGGGGATCAGTGATAGCC |
| 3164 | CCAAAGGGGATCAGTGATAGCCA |
| 3165 | AGCCCTACCCAGACATGATGTGGA |
| 3166 | GCCCTACCCAGACATGATGTGGAG |
| 3167 | CCCTACCCAGACATGATGTGGAGG |
| 3168 | CCTACCCAGACATGATGTGGAGGT |
| 3169 | CTACCCAGACATGATGTGGAGGTG |
| 3170 | TACCCAGACATGATGTGGAGGTGG |
| 3171 | ACCCAGACATGATGTGGAGGTGGA |
| 3172 | CCCAGACATGATGTGGAGGTGGAG |
| 3173 | CCAGACATGATGTGGAGGTGGAGC |
| 3174 | CAGACATGATGTGGAGGTGGAGCA |
| 3175 | AGACATGATGTGGAGGTGGAGCAA |
| 3176 | GACATGATGTGGAGGTGGAGCAAA |
| 3177 | ACATGATGTGGAGGTGGAGCAAAC |
| 3178 | CATGATGTGGAGGTGGAGCAAACT |
| 3179 | ATGATGTGGAGGTGGAGCAAACTA |
| 3180 | TGATGTGGAGGTGGAGCAAACTAG |
| 3181 | GATGTGGAGGTGGAGCAAACTAGG |
| 3182 | ATGTGGAGGTGGAGCAAACTAGGC |
| 3183 | TGTGGAGGTGGAGCAAACTAGGCA |
| 3184 | GTGGAGGTGGAGCAAACTAGGCAC |
| 3185 | TGGAGGTGGAGCAAACTAGGCACT |
| 3186 | GGAGGTGGAGCAAACTAGGCACTG |
| 3187 | GAGGTGGAGCAAACTAGGCACTGA |
| 3188 | AGGTGGAGCAAACTAGGCACTGAG |
| 3189 | GGTGGAGCAAACTAGGCACTGAGC |
| 3190 | GTGGAGCAAACTAGGCACTGAGCC |
| 3191 | TGGAGCAAACTAGGCACTGAGCCA |
| 3192 | GGAGCAAACTAGGCACTGAGCCAA |
| 3193 | GAGCAAACTAGGCACTGAGCCAAA |
| 3194 | AGCAAACTAGGCACTGAGCCAAAG |
| 3195 | GCAAACTAGGCACTGAGCCAAAGG |
| 3196 | CAAACTAGGCACTGAGCCAAAGGG |
| 3197 | AAACTAGGCACTGAGCCAAAGGGG |
| 3198 | AACTAGGCACTGAGCCAAAGGGGA |
| 3199 | ACTAGGCACTGAGCCAAAGGGGAT |
| 3200 | CTAGGCACTGAGCCAAAGGGGATC |
| 3201 | TAGGCACTGAGCCAAAGGGGATCA |
| 3202 | AGGCACTGAGCCAAAGGGGATCAG |
| 3203 | GGCACTGAGCCAAAGGGGATCAGT |
| 3204 | GCACTGAGCCAAAGGGGATCAGTG |
| 3205 | CACTGAGCCAAAGGGGATCAGTGA |
| 3206 | ACTGAGCCAAAGGGGATCAGTGAT |
| 3207 | CTGAGCCAAAGGGGATCAGTGATA |
| 3208 | TGAGCCAAAGGGGATCAGTGATAG |
| 3209 | GAGCCAAAGGGGATCAGTGATAGC |
| 3210 | AGCCAAAGGGGATCAGTGATAGCC |
| 3211 | GCCAAAGGGGATCAGTGATAGCCA |
| 3212 | AGCCCTACCCAGACATGATGTGGAG |
| 3213 | GCCCTACCCAGACATGATGTGGAGG |
| 3214 | CCCTACCCAGACATGATGTGGAGGT |
| 3215 | CCTACCCAGACATGATGTGGAGGTG |
| 3216 | CTACCCAGACATGATGTGGAGGTGG |
| 3217 | TACCCAGACATGATGTGGAGGTGGA |
| 3218 | ACCCAGACATGATGTGGAGGTGGAG |
| 3219 | CCCAGACATGATGTGGAGGTGGAGC |
| 3220 | CCAGACATGATGTGGAGGTGGAGCA |
| 3221 | CAGACATGATGTGGAGGTGGAGCAA |
| 3222 | AGACATGATGTGGAGGTGGAGCAAA |
| 3223 | GACATGATGTGGAGGTGGAGCAAAC |
| 3224 | ACATGATGTGGAGGTGGAGCAAACT |
| 3225 | CATGATGTGGAGGTGGAGCAAACTA |
| 3226 | ATGATGTGGAGGTGGAGCAAACTAG |
| 3227 | TGATGTGGAGGTGGAGCAAACTAGG |
| 3228 | GATGTGGAGGTGGAGCAAACTAGGC |
| 3229 | ATGTGGAGGTGGAGCAAACTAGGCA |
| 3230 | TGTGGAGGTGGAGCAAACTAGGCAC |
| 3231 | GTGGAGGTGGAGCAAACTAGGCACT |
| 3232 | TGGAGGTGGAGCAAACTAGGCACTG |
| 3233 | GGAGGTGGAGCAAACTAGGCACTGA |
| 3234 | GAGGTGGAGCAAACTAGGCACTGAG |
| 3235 | AGGTGGAGCAAACTAGGCACTGAGC |
| 3236 | GGTGGAGCAAACTAGGCACTGAGCC |
| 3237 | GTGGAGCAAACTAGGCACTGAGCCA |
| 3238 | TGGAGCAAACTAGGCACTGAGCCAA |
| 3239 | GGAGCAAACTAGGCACTGAGCCAAA |
| 3240 | GAGCAAACTAGGCACTGAGCCAAAG |
| 3241 | AGCAAACTAGGCACTGAGCCAAAGG |
| 3242 | GCAAACTAGGCACTGAGCCAAAGGG |
| 3243 | CAAACTAGGCACTGAGCCAAAGGGG |
| 3244 | AAACTAGGCACTGAGCCAAAGGGGA |
| 3245 | AACTAGGCACTGAGCCAAAGGGGAT |
| 3246 | ACTAGGCACTGAGCCAAAGGGGATC |
| 3247 | CTAGGCACTGAGCCAAAGGGGATCA |
| 3248 | TAGGCACTGAGCCAAAGGGGATCAG |
| 3249 | AGGCACTGAGCCAAAGGGGATCAGT |
| 3250 | GGCACTGAGCCAAAGGGGATCAGTG |
| 3251 | GCACTGAGCCAAAGGGGATCAGTGA |
| 3252 | CACTGAGCCAAAGGGGATCAGTGAT |
| 3253 | ACTGAGCCAAAGGGGATCAGTGATA |
| 3254 | CTGAGCCAAAGGGGATCAGTGATAG |
| 3255 | TGAGCCAAAGGGGATCAGTGATAGC |
| 3256 | GAGCCAAAGGGGATCAGTGATAGCC |
| 3257 | AGCCAAAGGGGATCAGTGATAGCCA |
| 3258 | AGCCCTACCCAGACATGATGTGGAGG |
| 3259 | GCCCTACCCAGACATGATGTGGAGGT |
| 3260 | CCCTACCCAGACATGATGTGGAGGTG |
| 3261 | CCTACCCAGACATGATGTGGAGGTGG |
| 3262 | CTACCCAGACATGATGTGGAGGTGGA |
| 3263 | TACCCAGACATGATGTGGAGGTGGAG |
| 3264 | ACCCAGACATGATGTGGAGGTGGAGC |
| 3265 | CCCAGACATGATGTGGAGGTGGAGCA |
| 3266 | CCAGACATGATGTGGAGGTGGAGCAA |
| 3267 | CAGACATGATGTGGAGGTGGAGCAAA |
| 3268 | AGACATGATGTGGAGGTGGAGCAAAC |
| 3269 | GACATGATGTGGAGGTGGAGCAAACT |
| 3270 | ACATGATGTGGAGGTGGAGCAAACTA |
| 3271 | CATGATGTGGAGGTGGAGCAAACTAG |
| 3272 | ATGATGTGGAGGTGGAGCAAACTAGG |
| 3273 | TGATGTGGAGGTGGAGCAAACTAGGC |
| 3274 | GATGTGGAGGTGGAGCAAACTAGGCA |
| 3275 | ATGTGGAGGTGGAGCAAACTAGGCAC |
| 3276 | TGTGGAGGTGGAGCAAACTAGGCACT |
| 3277 | GTGGAGGTGGAGCAAACTAGGCACTG |
| 3278 | TGGAGGTGGAGCAAACTAGGCACTGA |
| 3279 | GGAGGTGGAGCAAACTAGGCACTGAG |
| 3280 | GAGGTGGAGCAAACTAGGCACTGAGC |
| 3281 | AGGTGGAGCAAACTAGGCACTGAGCC |
| 3282 | GGTGGAGCAAACTAGGCACTGAGCCA |
| 3283 | GTGGAGCAAACTAGGCACTGAGCCAA |
| 3284 | TGGAGCAAACTAGGCACTGAGCCAAA |
| 3285 | GGAGCAAACTAGGCACTGAGCCAAAG |
| 3286 | GAGCAAACTAGGCACTGAGCCAAAGG |
| 3287 | AGCAAACTAGGCACTGAGCCAAAGGG |
| 3288 | GCAAACTAGGCACTGAGCCAAAGGGG |
| 3289 | CAAACTAGGCACTGAGCCAAAGGGGA |
| 3290 | AAACTAGGCACTGAGCCAAAGGGGAT |
| 3291 | AACTAGGCACTGAGCCAAAGGGGATC |
| 3292 | ACTAGGCACTGAGCCAAAGGGGATCA |
| 3293 | CTAGGCACTGAGCCAAAGGGGATCAG |
| 3294 | TAGGCACTGAGCCAAAGGGGATCAGT |
| 3295 | AGGCACTGAGCCAAAGGGGATCAGTG |
| 3296 | GGCACTGAGCCAAAGGGGATCAGTGA |
| 3297 | GCACTGAGCCAAAGGGGATCAGTGAT |
| 3298 | CACTGAGCCAAAGGGGATCAGTGATA |
| 3299 | ACTGAGCCAAAGGGGATCAGTGATAG |
| 3300 | CTGAGCCAAAGGGGATCAGTGATAGC |
| 3301 | TGAGCCAAAGGGGATCAGTGATAGCC |
| 3302 | GAGCCAAAGGGGATCAGTGATAGCCA |
| 3303 | ATTAGTCTTATTTGGCGT |
| 3304 | TTAGTCTTATTTGGCGTT |
| 3305 | TAGTCTTATTTGGCGTTA |
| 3306 | AGTCTTATTTGGCGTTAT |
| 3307 | GTCTTATTTGGCGTTATT |
| 3308 | TCTTATTTGGCGTTATTA |
| 3309 | CTTATTTGGCGTTATTAA |
| 3310 | GCGTTATTAATTCTACAG |
| 3311 | CGTTATTAATTCTACAGA |
| 3312 | TAATTCTACAGAGGGAGC |
| 3313 | TTCTACAGAGGGAGCATA |
| 3314 | CTACAGAGGGAGCATAAA |
| 3315 | TGCTAGGATTGTAATTAGT |
| 3316 | CTAGGATTGTAATTAGTCT |
| 3317 | GTAATTAGTCTTATTTGGC |
| 3318 | TAATTAGTCTTATTTGGCG |
| 3319 | AATTAGTCTTATTTGGCGT |
| 3320 | ATTAGTCTTATTTGGCGTT |
| 3321 | TTAGTCTTATTTGGCGTTA |
| 3322 | TAGTCTTATTTGGCGTTAT |
| 3323 | AGTCTTATTTGGCGTTATT |
| 3324 | GTCTTATTTGGCGTTATTA |
| 3325 | TCTTATTTGGCGTTATTAA |
| 3326 | CTTATTTGGCGTTATTAAT |
| 3327 | TTATTTGGCGTTATTAATT |
| 3328 | GGCGTTATTAATTCTACAG |
| 3329 | GCGTTATTAATTCTACAGA |
| 3330 | CGTTATTAATTCTACAGAG |
| 3331 | ATTAATTCTACAGAGGGAG |
| 3332 | TTAATTCTACAGAGGGAGC |
| 3333 | TAATTCTACAGAGGGAGCA |
| 3334 | ATTCTACAGAGGGAGCATA |
| 3335 | TTCTACAGAGGGAGCATAA |
| 3336 | TCTACAGAGGGAGCATAAA |
| 3337 | CTACAGAGGGAGCATAAAA |
| 3338 | TACAGAGGGAGCATAAAAC |
| 3339 | TGCTAGGATTGTAATTAGTC |
| 3340 | GCTAGGATTGTAATTAGTCT |
| 3341 | CTAGGATTGTAATTAGTCTT |
| 3342 | TAGGATTGTAATTAGTCTTA |
| 3343 | TGTAATTAGTCTTATTTGGC |
| 3344 | GTAATTAGTCTTATTTGGCG |
| 3345 | TAATTAGTCTTATTTGGCGT |
| 3346 | AATTAGTCTTATTTGGCGTT |
| 3347 | ATTAGTCTTATTTGGCGTTA |
| 3348 | TTAGTCTTATTTGGCGTTAT |
| 3349 | TAGTCTTATTTGGCGTTATT |
| 3350 | AGTCTTATTTGGCGTTATTA |
| 3351 | GTCTTATTTGGCGTTATTAA |
| 3352 | TCTTATTTGGCGTTATTAAT |
| 3353 | CTTATTTGGCGTTATTAATT |
| 3354 | TTATTTGGCGTTATTAATTC |
| 3355 | TTTGGCGTTATTAATTCTAC |
| 3356 | TGGCGTTATTAATTCTACAG |
| 3357 | GGCGTTATTAATTCTACAGA |
| 3358 | GCGTTATTAATTCTACAGAG |
| 3359 | CGTTATTAATTCTACAGAGG |
| 3360 | GTTATTAATTCTACAGAGGG |
| 3361 | TATTAATTCTACAGAGGGAG |
| 3362 | ATTAATTCTACAGAGGGAGC |
| 3363 | TTAATTCTACAGAGGGAGCA |
| 3364 | TAATTCTACAGAGGGAGCAT |
| 3365 | AATTCTACAGAGGGAGCATA |
| 3366 | ATTCTACAGAGGGAGCATAA |
| 3367 | TTCTACAGAGGGAGCATAAA |
| 3368 | TCTACAGAGGGAGCATAAAA |
| 3369 | CTACAGAGGGAGCATAAAAC |
| 3370 | TACAGAGGGAGCATAAAACA |
| 3371 | AGAGGGAGCATAAAACATTT |
| 3372 | GGGAGCATAAAACATTTAAT |
| 3373 | TGCTAGGATTGTAATTAGTCT |
| 3374 | GCTAGGATTGTAATTAGTCTT |
| 3375 | CTAGGATTGTAATTAGTCTTA |
| 3376 | TAGGATTGTAATTAGTCTTAT |
| 3377 | ATTGTAATTAGTCTTATTTGG |
| 3378 | TTGTAATTAGTCTTATTTGGC |
| 3379 | TGTAATTAGTCTTATTTGGCG |
| 3380 | GTAATTAGTCTTATTTGGCGT |
| 3381 | TAATTAGTCTTATTTGGCGTT |
| 3382 | AATTAGTCTTATTTGGCGTTA |
| 3383 | ATTAGTCTTATTTGGCGTTAT |
| 3384 | TTAGTCTTATTTGGCGTTATT |
| 3385 | TAGTCTTATTTGGCGTTATTA |
| 3386 | AGTCTTATTTGGCGTTATTAA |
| 3387 | GTCTTATTTGGCGTTATTAAT |
| 3388 | TCTTATTTGGCGTTATTAATT |
| 3389 | CTTATTTGGCGTTATTAATTC |
| 3390 | TTATTTGGCGTTATTAATTCT |
| 3391 | ATTTGGCGTTATTAATTCTAC |
| 3392 | TTTGGCGTTATTAATTCTACA |
| 3393 | TTGGCGTTATTAATTCTACAG |
| 3394 | TGGCGTTATTAATTCTACAGA |
| 3395 | GGCGTTATTAATTCTACAGAG |
| 3396 | GCGTTATTAATTCTACAGAGG |
| 3397 | CGTTATTAATTCTACAGAGGG |
| 3398 | GTTATTAATTCTACAGAGGGA |
| 3399 | TTATTAATTCTACAGAGGGAG |
| 3400 | TATTAATTCTACAGAGGGAGC |
| 3401 | ATTAATTCTACAGAGGGAGCA |
| 3402 | TTAATTCTACAGAGGGAGCAT |
| 3403 | TAATTCTACAGAGGGAGCATA |
| 3404 | AATTCTACAGAGGGAGCATAA |
| 3405 | ATTCTACAGAGGGAGCATAAA |
| 3406 | TTCTACAGAGGGAGCATAAAA |
| 3407 | TCTACAGAGGGAGCATAAAAC |
| 3408 | CTACAGAGGGAGCATAAAACA |
| 3409 | TACAGAGGGAGCATAAAACAT |
| 3410 | ACAGAGGGAGCATAAAACATT |
| 3411 | CAGAGGGAGCATAAAACATTT |
| 3412 | AGAGGGAGCATAAAACATTTA |
| 3413 | AGGGAGCATAAAACATTTAAT |
| 3414 | GGGAGCATAAAACATTTAATA |
| 3415 | GGAGCATAAAACATTTAATAA |
| 3416 | GAGCATAAAACATTTAATAAT |
| 3417 | TGCTAGGATTGTAATTAGTCTT |
| 3418 | GCTAGGATTGTAATTAGTCTTA |
| 3419 | CTAGGATTGTAATTAGTCTTAT |
| 3420 | TAGGATTGTAATTAGTCTTATT |
| 3421 | GATTGTAATTAGTCTTATTTGG |
| 3422 | ATTGTAATTAGTCTTATTTGGC |
| 3423 | TTGTAATTAGTCTTATTTGGCG |
| 3424 | TGTAATTAGTCTTATTTGGCGT |
| 3425 | GTAATTAGTCTTATTTGGCGTT |
| 3426 | TAATTAGTCTTATTTGGCGTTA |
| 3427 | AATTAGTCTTATTTGGCGTTAT |
| 3428 | ATTAGTCTTATTTGGCGTTATT |
| 3429 | TTAGTCTTATTTGGCGTTATTA |
| 3430 | TAGTCTTATTTGGCGTTATTAA |
| 3431 | AGTCTTATTTGGCGTTATTAAT |
| 3432 | GTCTTATTTGGCGTTATTAATT |
| 3433 | TCTTATTTGGCGTTATTAATTC |
| 3434 | CTTATTTGGCGTTATTAATTCT |
| 3435 | TTATTTGGCGTTATTAATTCTA |
| 3436 | TATTTGGCGTTATTAATTCTAC |
| 3437 | ATTTGGCGTTATTAATTCTACA |
| 3438 | TTTGGCGTTATTAATTCTACAG |
| 3439 | TTGGCGTTATTAATTCTACAGA |
| 3440 | TGGCGTTATTAATTCTACAGAG |
| 3441 | GGCGTTATTAATTCTACAGAGG |
| 3442 | GCGTTATTAATTCTACAGAGGG |
| 3443 | CGTTATTAATTCTACAGAGGGA |
| 3444 | GTTATTAATTCTACAGAGGGAG |
| 3445 | TTATTAATTCTACAGAGGGAGC |
| 3446 | TATTAATTCTACAGAGGGAGCA |
| 3447 | ATTAATTCTACAGAGGGAGCAT |
| 3448 | TTAATTCTACAGAGGGAGCATA |
| 3449 | TAATTCTACAGAGGGAGCATAA |
| 3450 | AATTCTACAGAGGGAGCATAAA |
| 3451 | ATTCTACAGAGGGAGCATAAAA |
| 3452 | TTCTACAGAGGGAGCATAAAAC |
| 3453 | TCTACAGAGGGAGCATAAAACA |
| 3454 | CTACAGAGGGAGCATAAAACAT |
| 3455 | TACAGAGGGAGCATAAAACATT |
| 3456 | ACAGAGGGAGCATAAAACATTT |
| 3457 | CAGAGGGAGCATAAAACATTTA |
| 3458 | AGAGGGAGCATAAAACATTTAA |
| 3459 | GAGGGAGCATAAAACATTTAAT |
| 3460 | AGGGAGCATAAAACATTTAATA |
| 3461 | GGGAGCATAAAACATTTAATAA |
| 3462 | GGAGCATAAAACATTTAATAAT |
| 3463 | GAGCATAAAACATTTAATAATA |
| 3464 | TGCTAGGATTGTAATTAGTCTTA |
| 3465 | GCTAGGATTGTAATTAGTCTTAT |
| 3466 | CTAGGATTGTAATTAGTCTTATT |
| 3467 | TAGGATTGTAATTAGTCTTATTT |
| 3468 | AGGATTGTAATTAGTCTTATTTG |
| 3469 | GGATTGTAATTAGTCTTATTTGG |
| 3470 | GATTGTAATTAGTCTTATTTGGC |
| 3471 | ATTGTAATTAGTCTTATTTGGCG |
| 3472 | TTGTAATTAGTCTTATTTGGCGT |
| 3473 | TGTAATTAGTCTTATTTGGCGTT |
| 3474 | GTAATTAGTCTTATTTGGCGTTA |
| 3475 | TAATTAGTCTTATTTGGCGTTAT |
| 3476 | AATTAGTCTTATTTGGCGTTATT |
| 3477 | ATTAGTCTTATTTGGCGTTATTA |
| 3478 | TTAGTCTTATTTGGCGTTATTAA |
| 3479 | TAGTCTTATTTGGCGTTATTAAT |
| 3480 | AGTCTTATTTGGCGTTATTAATT |
| 3481 | GTCTTATTTGGCGTTATTAATTC |
| 3482 | TCTTATTTGGCGTTATTAATTCT |
| 3483 | CTTATTTGGCGTTATTAATTCTA |
| 3484 | TTATTTGGCGTTATTAATTCTAC |
| 3485 | TATTTGGCGTTATTAATTCTACA |
| 3486 | ATTTGGCGTTATTAATTCTACAG |
| 3487 | TTTGGCGTTATTAATTCTACAGA |
| 3488 | TTGGCGTTATTAATTCTACAGAG |
| 3489 | TGGCGTTATTAATTCTACAGAGG |
| 3490 | GGCGTTATTAATTCTACAGAGGG |
| 3491 | GCGTTATTAATTCTACAGAGGGA |
| 3492 | CGTTATTAATTCTACAGAGGGAG |
| 3493 | GTTATTAATTCTACAGAGGGAGC |
| 3494 | TTATTAATTCTACAGAGGGAGCA |
| 3495 | TATTAATTCTACAGAGGGAGCAT |
| 3496 | ATTAATTCTACAGAGGGAGCATA |
| 3497 | TTAATTCTACAGAGGGAGCATAA |
| 3498 | TAATTCTACAGAGGGAGCATAAA |
| 3499 | AATTCTACAGAGGGAGCATAAAA |
| 3500 | ATTCTACAGAGGGAGCATAAAAC |
| 3501 | TTCTACAGAGGGAGCATAAAACA |
| 3502 | TCTACAGAGGGAGCATAAAACAT |
| 3503 | CTACAGAGGGAGCATAAAACATT |
| 3504 | TACAGAGGGAGCATAAAACATTT |
| 3505 | ACAGAGGGAGCATAAAACATTTA |
| 3506 | CAGAGGGAGCATAAAACATTTAA |
| 3507 | AGAGGGAGCATAAAACATTTAAT |
| 3508 | GAGGGAGCATAAAACATTTAATA |
| 3509 | AGGGAGCATAAAACATTTAATAA |
| 3510 | GGGAGCATAAAACATTTAATAAT |
| 3511 | GGAGCATAAAACATTTAATAATA |
| 3512 | TGCTAGGATTGTAATTAGTCTTAT |
| 3513 | GCTAGGATTGTAATTAGTCTTATT |
| 3514 | CTAGGATTGTAATTAGTCTTATTT |
| 3515 | TAGGATTGTAATTAGTCTTATTTG |
| 3516 | AGGATTGTAATTAGTCTTATTTGG |
| 3517 | GGATTGTAATTAGTCTTATTTGGC |
| 3518 | GATTGTAATTAGTCTTATTTGGCG |
| 3519 | ATTGTAATTAGTCTTATTTGGCGT |
| 3520 | TTGTAATTAGTCTTATTTGGCGTT |
| 3521 | TGTAATTAGTCTTATTTGGCGTTA |
| 3522 | GTAATTAGTCTTATTTGGCGTTAT |
| 3523 | TAATTAGTCTTATTTGGCGTTATT |
| 3524 | AATTAGTCTTATTTGGCGTTATTA |
| 3525 | ATTAGTCTTATTTGGCGTTATTAA |
| 3526 | TTAGTCTTATTTGGCGTTATTAAT |
| 3527 | TAGTCTTATTTGGCGTTATTAATT |
| 3528 | AGTCTTATTTGGCGTTATTAATTC |
| 3529 | GTCTTATTTGGCGTTATTAATTCT |
| 3530 | TCTTATTTGGCGTTATTAATTCTA |
| 3531 | CTTATTTGGCGTTATTAATTCTAC |
| 3532 | TTATTTGGCGTTATTAATTCTACA |
| 3533 | TATTTGGCGTTATTAATTCTACAG |
| 3534 | ATTTGGCGTTATTAATTCTACAGA |
| 3535 | TTTGGCGTTATTAATTCTACAGAG |
| 3536 | TTGGCGTTATTAATTCTACAGAGG |
| 3537 | TGGCGTTATTAATTCTACAGAGGG |
| 3538 | GGCGTTATTAATTCTACAGAGGGA |
| 3539 | GCGTTATTAATTCTACAGAGGGAG |
| 3540 | CGTTATTAATTCTACAGAGGGAGC |
| 3541 | GTTATTAATTCTACAGAGGGAGCA |
| 3542 | TTATTAATTCTACAGAGGGAGCAT |
| 3543 | TATTAATTCTACAGAGGGAGCATA |
| 3544 | ATTAATTCTACAGAGGGAGCATAA |
| 3545 | TTAATTCTACAGAGGGAGCATAAA |
| 3546 | TAATTCTACAGAGGGAGCATAAAA |
| 3547 | AATTCTACAGAGGGAGCATAAAAC |
| 3548 | ATTCTACAGAGGGAGCATAAAACA |
| 3549 | TTCTACAGAGGGAGCATAAAACAT |
| 3550 | TCTACAGAGGGAGCATAAAACATT |
| 3551 | CTACAGAGGGAGCATAAAACATTT |
| 3552 | TACAGAGGGAGCATAAAACATTTA |
| 3553 | ACAGAGGGAGCATAAAACATTTAA |
| 3554 | CAGAGGGAGCATAAAACATTTAAT |
| 3555 | AGAGGGAGCATAAAACATTTAATA |
| 3556 | GAGGGAGCATAAAACATTTAATAA |
| 3557 | AGGGAGCATAAAACATTTAATAAT |
| 3558 | GGGAGCATAAAACATTTAATAATA |
| 3559 | TGCTAGGATTGTAATTAGTCTTATT |
| 3560 | GCTAGGATTGTAATTAGTCTTATTT |
| 3561 | CTAGGATTGTAATTAGTCTTATTTG |
| 3562 | TAGGATTGTAATTAGTCTTATTTGG |
| 3563 | AGGATTGTAATTAGTCTTATTTGGC |
| 3564 | GGATTGTAATTAGTCTTATTTGGCG |
| 3565 | GATTGTAATTAGTCTTATTTGGCGT |
| 3566 | ATTGTAATTAGTCTTATTTGGCGTT |
| 3567 | TTGTAATTAGTCTTATTTGGCGTTA |
| 3568 | TGTAATTAGTCTTATTTGGCGTTAT |
| 3569 | GTAATTAGTCTTATTTGGCGTTATT |
| 3570 | TAATTAGTCTTATTTGGCGTTATTA |
| 3571 | AATTAGTCTTATTTGGCGTTATTAA |
| 3572 | ATTAGTCTTATTTGGCGTTATTAAT |
| 3573 | TTAGTCTTATTTGGCGTTATTAATT |
| 3574 | TAGTCTTATTTGGCGTTATTAATTC |
| 3575 | AGTCTTATTTGGCGTTATTAATTCT |
| 3576 | GTCTTATTTGGCGTTATTAATTCTA |
| 3577 | TCTTATTTGGCGTTATTAATTCTAC |
| 3578 | CTTATTTGGCGTTATTAATTCTACA |
| 3579 | TTATTTGGCGTTATTAATTCTACAG |
| 3580 | TATTTGGCGTTATTAATTCTACAGA |
| 3581 | ATTTGGCGTTATTAATTCTACAGAG |
| 3582 | TTTGGCGTTATTAATTCTACAGAGG |
| 3583 | TTGGCGTTATTAATTCTACAGAGGG |
| 3584 | TGGCGTTATTAATTCTACAGAGGGA |
| 3585 | GGCGTTATTAATTCTACAGAGGGAG |
| 3586 | GCGTTATTAATTCTACAGAGGGAGC |
| 3587 | CGTTATTAATTCTACAGAGGGAGCA |
| 3588 | GTTATTAATTCTACAGAGGGAGCAT |
| 3589 | TTATTAATTCTACAGAGGGAGCATA |
| 3590 | TATTAATTCTACAGAGGGAGCATAA |
| 3591 | ATTAATTCTACAGAGGGAGCATAAA |
| 3592 | TTAATTCTACAGAGGGAGCATAAAA |
| 3593 | TAATTCTACAGAGGGAGCATAAAAC |
| 3594 | AATTCTACAGAGGGAGCATAAAACA |
| 3595 | ATTCTACAGAGGGAGCATAAAACAT |
| 3596 | TTCTACAGAGGGAGCATAAAACATT |
| 3597 | TCTACAGAGGGAGCATAAAACATTT |
| 3598 | CTACAGAGGGAGCATAAAACATTTA |
| 3599 | TACAGAGGGAGCATAAAACATTTAA |
| 3600 | ACAGAGGGAGCATAAAACATTTAAT |
| 3601 | CAGAGGGAGCATAAAACATTTAATA |
| 3602 | AGAGGGAGCATAAAACATTTAATAA |
| 3603 | GAGGGAGCATAAAACATTTAATAAT |
| 3604 | AGGGAGCATAAAACATTTAATAATA |
| 3605 | TGCTAGGATTGTAATTAGTCTTATTT |
| 3606 | GCTAGGATTGTAATTAGTCTTATTTG |
| 3607 | CTAGGATTGTAATTAGTCTTATTTGG |
| 3608 | TAGGATTGTAATTAGTCTTATTTGGC |
| 3609 | AGGATTGTAATTAGTCTTATTTGGCG |
| 3610 | GGATTGTAATTAGTCTTATTTGGCGT |
| 3611 | GATTGTAATTAGTCTTATTTGGCGTT |
| 3612 | ATTGTAATTAGTCTTATTTGGCGTTA |
| 3613 | TTGTAATTAGTCTTATTTGGCGTTAT |
| 3614 | TGTAATTAGTCTTATTTGGCGTTATT |
| 3615 | GTAATTAGTCTTATTTGGCGTTATTA |
| 3616 | TAATTAGTCTTATTTGGCGTTATTAA |
| 3617 | AATTAGTCTTATTTGGCGTTATTAAT |
| 3618 | ATTAGTCTTATTTGGCGTTATTAATT |
| 3619 | TTAGTCTTATTTGGCGTTATTAATTC |
| 3620 | TAGTCTTATTTGGCGTTATTAATTCT |
| 3621 | AGTCTTATTTGGCGTTATTAATTCTA |
| 3622 | GTCTTATTTGGCGTTATTAATTCTAC |
| 3623 | TCTTATTTGGCGTTATTAATTCTACA |
| 3624 | CTTATTTGGCGTTATTAATTCTACAG |
| 3625 | TTATTTGGCGTTATTAATTCTACAGA |
| 3626 | TATTTGGCGTTATTAATTCTACAGAG |
| 3627 | ATTTGGCGTTATTAATTCTACAGAGG |
| 3628 | TTTGGCGTTATTAATTCTACAGAGGG |
| 3629 | TTGGCGTTATTAATTCTACAGAGGGA |
| 3630 | TGGCGTTATTAATTCTACAGAGGGAG |
| 3631 | GGCGTTATTAATTCTACAGAGGGAGC |
| 3632 | GCGTTATTAATTCTACAGAGGGAGCA |
| 3633 | CGTTATTAATTCTACAGAGGGAGCAT |
| 3634 | GTTATTAATTCTACAGAGGGAGCATA |
| 3635 | TTATTAATTCTACAGAGGGAGCATAA |
| 3636 | TATTAATTCTACAGAGGGAGCATAAA |
| 3637 | ATTAATTCTACAGAGGGAGCATAAAA |
| 3638 | TTAATTCTACAGAGGGAGCATAAAAC |
| 3639 | TAATTCTACAGAGGGAGCATAAAACA |
| 3640 | AATTCTACAGAGGGAGCATAAAACAT |
| 3641 | ATTCTACAGAGGGAGCATAAAACATT |
| 3642 | TTCTACAGAGGGAGCATAAAACATTT |
| 3643 | TCTACAGAGGGAGCATAAAACATTTA |
| 3644 | CTACAGAGGGAGCATAAAACATTTAA |
| 3645 | TACAGAGGGAGCATAAAACATTTAAT |
| 3646 | ACAGAGGGAGCATAAAACATTTAATA |
| 3647 | CAGAGGGAGCATAAAACATTTAATAA |
| 3648 | AGAGGGAGCATAAAACATTTAATAAT |
| 3649 | GAGGGAGCATAAAACATTTAATAATA |
| 3650 | CATTGGACTTACTCAACT |
| 3651 | ATTGGACTTACTCAACTC |
| 3652 | TTGGACTTACTCAACTCA |
| 3653 | GACTTACTCAACTCACTA |
| 3654 | ACTTACTCAACTCACTAT |
| 3655 | TATTTCTTACTTTCGTCC |
| 3656 | CTTACTTTCGTCCTTAAG |
| 3657 | ATAATACATTGGACTTACT |
| 3658 | TAATACATTGGACTTACTC |
| 3659 | TACATTGGACTTACTCAAC |
| 3660 | ACATTGGACTTACTCAACT |
| 3661 | CATTGGACTTACTCAACTC |
| 3662 | ATTGGACTTACTCAACTCA |
| 3663 | TTGGACTTACTCAACTCAC |
| 3664 | GGACTTACTCAACTCACTA |
| 3665 | GACTTACTCAACTCACTAT |
| 3666 | ACTTACTCAACTCACTATT |
| 3667 | TTACTCAACTCACTATTTC |
| 3668 | AACTCACTATTTCTTACTT |
| 3669 | TCACTATTTCTTACTTTCG |
| 3670 | ACTATTTCTTACTTTCGTC |
| 3671 | CTATTTCTTACTTTCGTCC |
| 3672 | TATTTCTTACTTTCGTCCT |
| 3673 | ATTTCTTACTTTCGTCCTT |
| 3674 | TCTTACTTTCGTCCTTAAG |
| 3675 | TTAATAATACATTGGACTTA |
| 3676 | AATAATACATTGGACTTACT |
| 3677 | TAATACATTGGACTTACTCA |
| 3678 | AATACATTGGACTTACTCAA |
| 3679 | ATACATTGGACTTACTCAAC |
| 3680 | TACATTGGACTTACTCAACT |
| 3681 | ACATTGGACTTACTCAACTC |
| 3682 | CATTGGACTTACTCAACTCA |
| 3683 | ATTGGACTTACTCAACTCAC |
| 3684 | TTGGACTTACTCAACTCACT |
| 3685 | TGGACTTACTCAACTCACTA |
| 3686 | GACTTACTCAACTCACTATT |
| 3687 | ACTTACTCAACTCACTATTT |
| 3688 | CTTACTCAACTCACTATTTC |
| 3689 | TTACTCAACTCACTATTTCT |
| 3690 | TACTCAACTCACTATTTCTT |
| 3691 | CAACTCACTATTTCTTACTT |
| 3692 | AACTCACTATTTCTTACTTT |
| 3693 | CTCACTATTTCTTACTTTCG |
| 3694 | TCACTATTTCTTACTTTCGT |
| 3695 | ACTATTTCTTACTTTCGTCC |
| 3696 | CTATTTCTTACTTTCGTCCT |
| 3697 | TATTTCTTACTTTCGTCCTT |
| 3698 | ATTTCTTACTTTCGTCCTTA |
| 3699 | TTCTTACTTTCGTCCTTAAG |
| 3700 | AAAACATTTAATAATACATTG |
| 3701 | AAACATTTAATAATACATTGG |
| 3702 | AACATTTAATAATACATTGGA |
| 3703 | ACATTTAATAATACATTGGAC |
| 3704 | ATTTAATAATACATTGGACTT |
| 3705 | TTTAATAATACATTGGACTTA |
| 3706 | TTAATAATACATTGGACTTAC |
| 3707 | TAATAATACATTGGACTTACT |
| 3708 | AATAATACATTGGACTTACTC |
| 3709 | ATAATACATTGGACTTACTCA |
| 3710 | TAATACATTGGACTTACTCAA |
| 3711 | AATACATTGGACTTACTCAAC |
| 3712 | ATACATTGGACTTACTCAACT |
| 3713 | TACATTGGACTTACTCAACTC |
| 3714 | ACATTGGACTTACTCAACTCA |
| 3715 | CATTGGACTTACTCAACTCAC |
| 3716 | ATTGGACTTACTCAACTCACT |
| 3717 | TTGGACTTACTCAACTCACTA |
| 3718 | TGGACTTACTCAACTCACTAT |
| 3719 | GGACTTACTCAACTCACTATT |
| 3720 | GACTTACTCAACTCACTATTT |
| 3721 | ACTTACTCAACTCACTATTTC |
| 3722 | CTTACTCAACTCACTATTTCT |
| 3723 | TTACTCAACTCACTATTTCTT |
| 3724 | TACTCAACTCACTATTTCTTA |
| 3725 | ACTCAACTCACTATTTCTTAC |
| 3726 | CTCAACTCACTATTTCTTACT |
| 3727 | TCAACTCACTATTTCTTACTT |
| 3728 | CAACTCACTATTTCTTACTTT |
| 3729 | AACTCACTATTTCTTACTTTC |
| 3730 | ACTCACTATTTCTTACTTTCG |
| 3731 | CTCACTATTTCTTACTTTCGT |
| 3732 | TCACTATTTCTTACTTTCGTC |
| 3733 | CACTATTTCTTACTTTCGTCC |
| 3734 | ACTATTTCTTACTTTCGTCCT |
| 3735 | CTATTTCTTACTTTCGTCCTT |
| 3736 | TATTTCTTACTTTCGTCCTTA |
| 3737 | ATTTCTTACTTTCGTCCTTAA |
| 3738 | TTTCTTACTTTCGTCCTTAAG |
| 3739 | GCATAAAACATTTAATAATACA |
| 3740 | CATAAAACATTTAATAATACAT |
| 3741 | TAAAACATTTAATAATACATTG |
| 3742 | AAAACATTTAATAATACATTGG |
| 3743 | AAACATTTAATAATACATTGGA |
| 3744 | AACATTTAATAATACATTGGAC |
| 3745 | ACATTTAATAATACATTGGACT |
| 3746 | CATTTAATAATACATTGGACTT |
| 3747 | ATTTAATAATACATTGGACTTA |
| 3748 | TTTAATAATACATTGGACTTAC |
| 3749 | TTAATAATACATTGGACTTACT |
| 3750 | TAATAATACATTGGACTTACTC |
| 3751 | AATAATACATTGGACTTACTCA |
| 3752 | ATAATACATTGGACTTACTCAA |
| 3753 | TAATACATTGGACTTACTCAAC |
| 3754 | AATACATTGGACTTACTCAACT |
| 3755 | ATACATTGGACTTACTCAACTC |
| 3756 | TACATTGGACTTACTCAACTCA |
| 3757 | ACATTGGACTTACTCAACTCAC |
| 3758 | CATTGGACTTACTCAACTCACT |
| 3759 | ATTGGACTTACTCAACTCACTA |
| 3760 | TTGGACTTACTCAACTCACTAT |
| 3761 | TGGACTTACTCAACTCACTATT |
| 3762 | GGACTTACTCAACTCACTATTT |
| 3763 | GACTTACTCAACTCACTATTTC |
| 3764 | ACTTACTCAACTCACTATTTCT |
| 3765 | CTTACTCAACTCACTATTTCTT |
| 3766 | TTACTCAACTCACTATTTCTTA |
| 3767 | TACTCAACTCACTATTTCTTAC |
| 3768 | ACTCAACTCACTATTTCTTACT |
| 3769 | CTCAACTCACTATTTCTTACTT |
| 3770 | TCAACTCACTATTTCTTACTTT |
| 3771 | CAACTCACTATTTCTTACTTTC |
| 3772 | AACTCACTATTTCTTACTTTCG |
| 3773 | ACTCACTATTTCTTACTTTCGT |
| 3774 | CTCACTATTTCTTACTTTCGTC |
| 3775 | TCACTATTTCTTACTTTCGTCC |
| 3776 | CACTATTTCTTACTTTCGTCCT |
| 3777 | ACTATTTCTTACTTTCGTCCTT |
| 3778 | CTATTTCTTACTTTCGTCCTTA |
| 3779 | TATTTCTTACTTTCGTCCTTAA |
| 3780 | ATTTCTTACTTTCGTCCTTAAG |
| 3781 | GAGCATAAAACATTTAATAATAC |
| 3782 | AGCATAAAACATTTAATAATACA |
| 3783 | GCATAAAACATTTAATAATACAT |
| 3784 | CATAAAACATTTAATAATACATT |
| 3785 | ATAAAACATTTAATAATACATTG |
| 3786 | TAAAACATTTAATAATACATTGG |
| 3787 | AAAACATTTAATAATACATTGGA |
| 3788 | AAACATTTAATAATACATTGGAC |
| 3789 | AACATTTAATAATACATTGGACT |
| 3790 | ACATTTAATAATACATTGGACTT |
| 3791 | CATTTAATAATACATTGGACTTA |
| 3792 | ATTTAATAATACATTGGACTTAC |
| 3793 | TTTAATAATACATTGGACTTACT |
| 3794 | TTAATAATACATTGGACTTACTC |
| 3795 | TAATAATACATTGGACTTACTCA |
| 3796 | AATAATACATTGGACTTACTCAA |
| 3797 | ATAATACATTGGACTTACTCAAC |
| 3798 | TAATACATTGGACTTACTCAACT |
| 3799 | AATACATTGGACTTACTCAACTC |
| 3800 | ATACATTGGACTTACTCAACTCA |
| 3801 | TACATTGGACTTACTCAACTCAC |
| 3802 | ACATTGGACTTACTCAACTCACT |
| 3803 | CATTGGACTTACTCAACTCACTA |
| 3804 | ATTGGACTTACTCAACTCACTAT |
| 3805 | TTGGACTTACTCAACTCACTATT |
| 3806 | TGGACTTACTCAACTCACTATTT |
| 3807 | GGACTTACTCAACTCACTATTTC |
| 3808 | GACTTACTCAACTCACTATTTCT |
| 3809 | ACTTACTCAACTCACTATTTCTT |
| 3810 | CTTACTCAACTCACTATTTCTTA |
| 3811 | TTACTCAACTCACTATTTCTTAC |
| 3812 | TACTCAACTCACTATTTCTTACT |
| 3813 | ACTCAACTCACTATTTCTTACTT |
| 3814 | CTCAACTCACTATTTCTTACTTT |
| 3815 | TCAACTCACTATTTCTTACTTTC |
| 3816 | CAACTCACTATTTCTTACTTTCG |
| 3817 | AACTCACTATTTCTTACTTTCGT |
| 3818 | ACTCACTATTTCTTACTTTCGTC |
| 3819 | CTCACTATTTCTTACTTTCGTCC |
| 3820 | TCACTATTTCTTACTTTCGTCCT |
| 3821 | CACTATTTCTTACTTTCGTCCTT |
| 3822 | ACTATTTCTTACTTTCGTCCTTA |
| 3823 | CTATTTCTTACTTTCGTCCTTAA |
| 3824 | TATTTCTTACTTTCGTCCTTAAG |
| 3825 | GGAGCATAAAACATTTAATAATAC |
| 3826 | GAGCATAAAACATTTAATAATACA |
| 3827 | AGCATAAAACATTTAATAATACAT |
| 3828 | GCATAAAACATTTAATAATACATT |
| 3829 | CATAAAACATTTAATAATACATTG |
| 3830 | ATAAAACATTTAATAATACATTGG |
| 3831 | TAAAACATTTAATAATACATTGGA |
| 3832 | AAAACATTTAATAATACATTGGAC |
| 3833 | AAACATTTAATAATACATTGGACT |
| 3834 | AACATTTAATAATACATTGGACTT |
| 3835 | ACATTTAATAATACATTGGACTTA |
| 3836 | CATTTAATAATACATTGGACTTAC |
| 3837 | ATTTAATAATACATTGGACTTACT |
| 3838 | TTTAATAATACATTGGACTTACTC |
| 3839 | TTAATAATACATTGGACTTACTCA |
| 3840 | TAATAATACATTGGACTTACTCAA |
| 3841 | AATAATACATTGGACTTACTCAAC |
| 3842 | ATAATACATTGGACTTACTCAACT |
| 3843 | TAATACATTGGACTTACTCAACTC |
| 3844 | AATACATTGGACTTACTCAACTCA |
| 3845 | ATACATTGGACTTACTCAACTCAC |
| 3846 | TACATTGGACTTACTCAACTCACT |
| 3847 | ACATTGGACTTACTCAACTCACTA |
| 3848 | CATTGGACTTACTCAACTCACTAT |
| 3849 | ATTGGACTTACTCAACTCACTATT |
| 3850 | TTGGACTTACTCAACTCACTATTT |
| 3851 | TGGACTTACTCAACTCACTATTTC |
| 3852 | GGACTTACTCAACTCACTATTTCT |
| 3853 | GACTTACTCAACTCACTATTTCTT |
| 3854 | ACTTACTCAACTCACTATTTCTTA |
| 3855 | CTTACTCAACTCACTATTTCTTAC |
| 3856 | TTACTCAACTCACTATTTCTTACT |
| 3857 | TACTCAACTCACTATTTCTTACTT |
| 3858 | ACTCAACTCACTATTTCTTACTTT |
| 3859 | CTCAACTCACTATTTCTTACTTTC |
| 3860 | TCAACTCACTATTTCTTACTTTCG |
| 3861 | CAACTCACTATTTCTTACTTTCGT |
| 3862 | AACTCACTATTTCTTACTTTCGTC |
| 3863 | ACTCACTATTTCTTACTTTCGTCC |
| 3864 | CTCACTATTTCTTACTTTCGTCCT |
| 3865 | TCACTATTTCTTACTTTCGTCCTT |
| 3866 | CACTATTTCTTACTTTCGTCCTTA |
| 3867 | ACTATTTCTTACTTTCGTCCTTAA |
| 3868 | CTATTTCTTACTTTCGTCCTTAAG |
| 3869 | GGGAGCATAAAACATTTAATAATAC |
| 3870 | GGAGCATAAAACATTTAATAATACA |
| 3871 | GAGCATAAAACATTTAATAATACAT |
| 3872 | AGCATAAAACATTTAATAATACATT |
| 3873 | GCATAAAACATTTAATAATACATTG |
| 3874 | CATAAAACATTTAATAATACATTGG |
| 3875 | ATAAAACATTTAATAATACATTGGA |
| 3876 | TAAAACATTTAATAATACATTGGAC |
| 3877 | AAAACATTTAATAATACATTGGACT |
| 3878 | AAACATTTAATAATACATTGGACTT |
| 3879 | AACATTTAATAATACATTGGACTTA |
| 3880 | ACATTTAATAATACATTGGACTTAC |
| 3881 | CATTTAATAATACATTGGACTTACT |
| 3882 | ATTTAATAATACATTGGACTTACTC |
| 3883 | TTTAATAATACATTGGACTTACTCA |
| 3884 | TTAATAATACATTGGACTTACTCAA |
| 3885 | TAATAATACATTGGACTTACTCAAC |
| 3886 | AATAATACATTGGACTTACTCAACT |
| 3887 | ATAATACATTGGACTTACTCAACTC |
| 3888 | TAATACATTGGACTTACTCAACTCA |
| 3889 | AATACATTGGACTTACTCAACTCAC |
| 3890 | ATACATTGGACTTACTCAACTCACT |
| 3891 | TACATTGGACTTACTCAACTCACTA |
| 3892 | ACATTGGACTTACTCAACTCACTAT |
| 3893 | CATTGGACTTACTCAACTCACTATT |
| 3894 | ATTGGACTTACTCAACTCACTATTT |
| 3895 | TTGGACTTACTCAACTCACTATTTC |
| 3896 | TGGACTTACTCAACTCACTATTTCT |
| 3897 | GGACTTACTCAACTCACTATTTCTT |
| 3898 | GACTTACTCAACTCACTATTTCTTA |
| 3899 | ACTTACTCAACTCACTATTTCTTAC |
| 3900 | CTTACTCAACTCACTATTTCTTACT |
| 3901 | TTACTCAACTCACTATTTCTTACTT |
| 3902 | TACTCAACTCACTATTTCTTACTTT |
| 3903 | ACTCAACTCACTATTTCTTACTTTC |
| 3904 | CTCAACTCACTATTTCTTACTTTCG |
| 3905 | TCAACTCACTATTTCTTACTTTCGT |
| 3906 | CAACTCACTATTTCTTACTTTCGTC |
| 3907 | AACTCACTATTTCTTACTTTCGTCC |
| 3908 | ACTCACTATTTCTTACTTTCGTCCT |
| 3909 | CTCACTATTTCTTACTTTCGTCCTT |
| 3910 | TCACTATTTCTTACTTTCGTCCTTA |
| 3911 | CACTATTTCTTACTTTCGTCCTTAA |
| 3912 | ACTATTTCTTACTTTCGTCCTTAAG |
| 3913 | AGGGAGCATAAAACATTTAATAATAC |
| 3914 | GGGAGCATAAAACATTTAATAATACA |
| 3915 | GGAGCATAAAACATTTAATAATACAT |
| 3916 | GAGCATAAAACATTTAATAATACATT |
| 3917 | AGCATAAAACATTTAATAATACATTG |
| 3918 | GCATAAAACATTTAATAATACATTGG |
| 3919 | CATAAAACATTTAATAATACATTGGA |
| 3920 | ATAAAACATTTAATAATACATTGGAC |
| 3921 | TAAAACATTTAATAATACATTGGACT |
| 3922 | AAAACATTTAATAATACATTGGACTT |
| 3923 | AAACATTTAATAATACATTGGACTTA |
| 3924 | AACATTTAATAATACATTGGACTTAC |
| 3925 | ACATTTAATAATACATTGGACTTACT |
| 3926 | CATTTAATAATACATTGGACTTACTC |
| 3927 | ATTTAATAATACATTGGACTTACTCA |
| 3928 | TTTAATAATACATTGGACTTACTCAA |
| 3929 | TTAATAATACATTGGACTTACTCAAC |
| 3930 | TAATAATACATTGGACTTACTCAACT |
| 3931 | AATAATACATTGGACTTACTCAACTC |
| 3932 | ATAATACATTGGACTTACTCAACTCA |
| 3933 | TAATACATTGGACTTACTCAACTCAC |
| 3934 | AATACATTGGACTTACTCAACTCACT |
| 3935 | ATACATTGGACTTACTCAACTCACTA |
| 3936 | TACATTGGACTTACTCAACTCACTAT |
| 3937 | ACATTGGACTTACTCAACTCACTATT |
| 3938 | CATTGGACTTACTCAACTCACTATTT |
| 3939 | ATTGGACTTACTCAACTCACTATTTC |
| 3940 | TTGGACTTACTCAACTCACTATTTCT |
| 3941 | TGGACTTACTCAACTCACTATTTCTT |
| 3942 | GGACTTACTCAACTCACTATTTCTTA |
| 3943 | GACTTACTCAACTCACTATTTCTTAC |
| 3944 | ACTTACTCAACTCACTATTTCTTACT |
| 3945 | CTTACTCAACTCACTATTTCTTACTT |
| 3946 | TTACTCAACTCACTATTTCTTACTTT |
| 3947 | TACTCAACTCACTATTTCTTACTTTC |
| 3948 | ACTCAACTCACTATTTCTTACTTTCG |
| 3949 | CTCAACTCACTATTTCTTACTTTCGT |
| 3950 | TCAACTCACTATTTCTTACTTTCGTC |
| 3951 | CAACTCACTATTTCTTACTTTCGTCC |
| 3952 | AACTCACTATTTCTTACTTTCGTCCT |
| 3953 | ACTCACTATTTCTTACTTTCGTCCTT |
| 3954 | CTCACTATTTCTTACTTTCGTCCTTA |
| 3955 | TCACTATTTCTTACTTTCGTCCTTAA |
| 3956 | CACTATTTCTTACTTTCGTCCTTAAG |

TABLE 9
Exemplary ASOs that target regRNA RR65_v1

| SEQ ID | |
|---|---|
| NO | Sequence |
| 3957 | GAATCACTTAGTTGTACTGT |
| 3958 | GTCATTGAAGAATCACTTAG |
| 3959 | GAGATGAGTCATTGAAGAAT |
| 3960 | TGAAGATTTGAGATGAGTCA |
| 3961 | TCGGAATGAAGATTTGAGAT |
| 3962 | GAAGTCATCGGAATGAAGAT |
| 3963 | CTTGAGAAGTCATCGGAATG |
| 3964 | GCGAAGCCTTGAGAAGTCAT |
| 3965 | ACTCAGCGAAGCCTTGAGAA |
| 3966 | GGATCACTCAGCGAAGCCTT |
| 3967 | GTGAGGGATCACTCAGCGAA |
| 3968 | TTTGGGTGAGGGATCACTCA |
| 3969 | AATCATTTGGGTGAGGGATC |
| 3970 | AGTCAATAATCATTTGGGTG |
| 3971 | GGAGAGGGAAGTCAATAATC |
| 3972 | TGAGGGAGGAGAGGGAAGTC |
| 3973 | AAATCTGGGGTGAGGGAGGA |
| 3974 | CATGAGAAATCTGGGGTGAG |
| 3975 | GCAGTGACACATGAGAAATC |
| 3976 | AATTGGCAGTGACACATGAG |
| 3977 | ATTTGAATTGGCAGTGACAC |
| 3978 | AGCCATGAATTTGAATTGGC |
| 3979 | GTGCTTTAGCCATGAATTTG |
| 3980 | AAGAGATTAGTGCTTTAGCC |
| 3981 | GTGTGGAAAGAGATTAGTGC |
| 3982 | TTCCAGGAAGTAGAGGTGTG |
| 3983 | AGAAAGGATTCCAGGAAGTA |
| 3984 | TAACAAGAAAGGATTCCAGG |
| 3985 | GACTGATAACAAGAAAGGAT |
| 3986 | GATATAAGACTGATAACAAG |
| 3987 | GGCATAGATATAAGACTGAT |
| 3988 | GAATTGGGCATAGATATAAG |
| 3989 | GCTGGCTGAATTGGGCATAG |
| 3990 | CCCAATGGCTGGCTGAATTG |
| 3991 | CATTACCCCAATGGCTGGCT |
| 3992 | GAAAGTTCATTACCCCAATG |
| 3993 | GAATGGAAAGTTCATTACCC |
| 3994 | GTTCTAGAATGGAAAGTTCA |
| 3995 | GGACTGTGGTTCTAGAATGG |
| 3996 | GGCAAATTGGACTGTGGTTC |
| 3997 | GGTAACAGGCAAATTGGACT |
| 3998 | AGTGAGGTAACAGGCAAATT |
| 3999 | TTCTCAGTGAGGTAACAGGC |
| 4000 | AGAGCCTTCTCAGTGAGGTA |
| 4001 | GCCCCAGAGCCTTCTCAGTG |
| 4002 | TGTCAGAGCCCCAGAGCCTT |
| 4003 | GTGTTTGTCAGAGCCCCAGA |
| 4004 | CAGCAGTGTTTGTCAGAGCC |
| 4005 | AACTCACAGCAGTGTTTGTC |
| 4006 | TTCAGGAAACTCACAGCAGT |
| 4007 | AAGTAGGTTTCAGGAAACTC |
| 4008 | GGTACTCCTGAGCCTGAAAT |
| 4009 | ATTGAGTTACTAGGCTTAGT |
| 4010 | TAACTATTGAGTTACTAGGC |
| 4011 | AAAATTAACTATTGAGTTAC |
| 4012 | TGGGGGCCCATTGGAGGGTG |
| 4013 | GACACTGGGGGCCCATTGGA |
| 4014 | CCAGTAAGTGTGAACTAAAT |
| 4015 | GAGGTTTCCAGTAAGTGTGA |
| 4016 | GCCAAAGGAGGTTTCCAGTA |
| 4017 | ATGTGGCCAAAGGAGGTTTC |
| 4018 | TGTCAAAATGTGGCCAAAGG |
| 4019 | CATAGTGTCAAAATGTGGCC |
| 4020 | CCTGACATAGTGTCAAAATG |
| 4021 | CAACCTCTCCTGACATAGTG |
| 4022 | AGGATCCAACCTCTCCTGAC |
| 4023 | GTTGGAGGATCCAACCTCTC |
| 4024 | TCGGCAGGGGTTGGAGGATC |
| 4025 | TGATCTCGGCAGGGGTTGGA |
| 4026 | TGCAGTGATCTCGGCAGGGG |
| 4027 | GTATCTGCAGTGATCTCGGC |
| 4028 | TCTAAGTATCTGCAGTGATC |
| 4029 | ATCCAGGCTCTAAGTATCTG |
| 4030 | ATCTTATCCAGGCTCTAAGT |
| 4031 | GTTGATCATCTTATCCAGGC |
| 4032 | AAGCACTGTTGATCATCTTA |
| 4033 | AGCTATTTAAAGCACTGTTG |
| 4034 | ATATAAGCTATTTAAAGCAC |
| 4035 | TCAGCACAGCTTTTTAAAAT |
| 4036 | GCAAAACATTCAGCACAGCT |
| 4037 | CAGTGGCCTGCAAAACATTC |
| 4038 | CACCTCAGTGGCCTGCAAAA |
| 4039 | GTCCGCACCTCAGTGGCCTG |
| 4040 | ACCATGTCCGCACCTCAGTG |
| 4041 | TATAAAACCATGTCCGCACC |
| 4042 | ACTGATATAAAACCATGTCC |
| 4043 | CACCTGTGATCTCACTGATA |
| 4044 | ACCTTGCTCACCTGTGATCT |
| 4045 | CAATAACACCTTGCTCACCT |
| 4046 | TATAGCCAATAACACCTTGC |
| 4047 | CAAACATTATAGCCAATAAC |
| 4048 | AGGCTGATTTTCAAACATTA |
| 4049 | TGTTAAAGGCTGATTTTCAA |
| 4050 | TCAGATGTTAAAGGCTGATT |
| 4051 | TATAATCAGATGTTAAAGGC |
| 4052 | ATAAGAAGTCAAATATAATC |
| 4053 | GGACACTCAAATAAGAAGTC |
| 4054 | TCCAAGGACACTCAAATAAG |
| 4055 | ACATGGTCCAAGGACACTCA |
| 4056 | TAGAAAATTTATACATTATC |
| 4057 | GAAGTTATAGAAAATTTATA |
| 4058 | TTATGCATGAAGAAGTTATA |
| 4059 | GGATTTTATGCATGAAGAAG |
| 4060 | ATGTTAATAGGATTTTATGC |
| 4061 | TCAGCAATGTTAATAGGATT |

TABLE 10
Exemplary ASOs that target regRNA RR74_v1

| SEQ ID | |
|---|---|
| NO | Sequence |
| 4062 | GGTTTGTGTTCACTTACTAG |
| 4063 | TCACAAAGGTTTGTGTTCAC |
| 4064 | TGAAATCACAAAGGTTTGTG |
| 4065 | GATGGTCTTTGAAATCACAA |
| 4066 | ATCTCAAGAGATGGTCTTTG |
| 4067 | TTAACCAATCTCAAGAGATG |
| 4068 | GTTAAAAGTTAACCAATCTC |
| 4069 | GGTTTAGTTAAAAGTTAACC |
| 4070 | TGGGAGGTTTAGTTAAAAGT |
| 4071 | CTGTGTGTCTGGGAGGTTTA |
| 4072 | TCAGGCTGTGTGTCTGGGAG |
| 4073 | TAAGGTCAGGCTGTGTGTCT |
| 4074 | ATTGGAAGATAAGGTCAGGC |
| 4075 | TGCAAGAAAGATTGGAAGAT |
| 4076 | CCTAACTGCAAGAAAGATTG |
| 4077 | ACATAACCACACCTAACTGC |
| 4078 | GTGCCACATAACCACACCTA |
| 4079 | TCCACTGGAGAGGACTGTGC |
| 4080 | CAGATTCCACTGGAGAGGAC |
| 4081 | TACTTCTACTCAGATTCCAC |
| 4082 | GTGGCATCCATTACTTCTAC |
| 4083 | CCTGGAAGTGGCATCCATTA |
| 4084 | TGTGGGCCAATCCTGGAAGT |
| 4085 | GAAAGTTCCTGTGGGCCAAT |
| 4086 | TTGTATGGAAAGTTCCTGTG |
| 4087 | GGAGCATTTTGTATGGAAAG |
| 4088 | GAAAATATGGAGCATTTTGT |
| 4089 | GAAGAGAAAATATGGAGCAT |
| 4090 | TCACACAGGGAAGAGAAAAT |
| 4091 | ATCCATCACACAGGGAAGAG |
| 4092 | CATGTATCCATCACACAGGG |
| 4093 | CATGGACATGTATCCATCAC |
| 4094 | CTTGGACATGGACATGTATC |
| 4095 | GGTCTCCTTGGACATGGACA |
| 4096 | GGCTTTTAAGGTCTCCTTGG |
| 4097 | CATGTGGCTTTTAAGGTCTC |
| 4098 | CCTCAACATGTGGCTTTTAA |
| 4099 | GAAGCTCTACCATCCTCAAC |
| 4100 | AGGCTGACAGAAGCTCTACC |
| 4101 | AGAGACCCAGGCTGACAGAA |
| 4102 | GCAAAGGTGCTCTGCTCCAT |
| 4103 | GTTGGGCAAAGGTGCTCTGC |
| 4104 | TCGGTGTTGGGCAAAGGTGC |
| 4105 | GGAAATCGGTGTTGGGCAAA |
| 4106 | TAAGGGGAAATCGGTGTTGG |
| 4107 | CTTGAATAAGGGGAAATCGG |
| 4108 | GTAGGCCTTGAATAAGGGGA |
| 4109 | AGTCCAGTAGGCCTTGAATA |
| 4110 | ATGTGAAGTCCAGTAGGCCT |
| 4111 | ATTTCCCCTCATGTGAAGTC |
| 4112 | GCTAATTATTTCCCCTCATG |
| 4113 | GTGATACTTGCTAATTATTT |
| 4114 | TTAAGGTAGTGATACTTGCT |
| 4115 | TTTGGTTAAGGTAGTGATAC |
| 4116 | GATGATTTGGTTAAGGTAGT |
| 4117 | CTTACTTGTTGGATGATTTG |
| 4118 | TTGCCACTTACTTGTTGGAT |
| 4119 | CTTTAGATCCTGGTTTTGCC |
| 4120 | ACTGGCTTTAGATCCTGGTT |
| 4121 | CAAAGAACTGGCTTTAGATC |
| 4122 | TGAAGTCACAAAGAACTGGC |
| 4123 | GCACAGGCTTGTGAAGTCAC |
| 4124 | GAAAAGAGCACAGGCTTGTG |
| 4125 | AATGGTATAGTGAAAAGAGC |
| 4126 | GGGAGGCAGAATGGTATAGT |
| 4127 | GCAGAGGGAGGCAGAATGGT |
| 4128 | TTGACTGCAGAGGGAGGCAG |
| 4129 | CAATTTCTGTAGTTTAGTTG |
| 4130 | CTGTGTGGAAGGACACAATT |
| 4131 | TTTTTAAAGCAAGCTGTGTG |
| 4132 | GCTTATGTATTTTTAAAGCA |
| 4133 | TCTTAGGTAGCTTATGTATT |
| 4134 | TTAGAGCTTTCTTAGGTAGC |
| 4135 | GTCTAAATTAGAGCTTTCTT |
| 4136 | AAAATGTCTAAATTAGAGCT |
| 4137 | CTAGCAGAGAGAAAAATGTC |
| 4138 | TAGAGACTAGCAGAGAGAAA |
| 4139 | TGGCATAGAGACTAGCAGAG |
| 4140 | GTTTTTTTGTGGCATAGAGA |
| 4141 | GGCTATGTTTTTTTGTGGCA |
| 4142 | TAATTGGCTATGTTTTTTTG |
| 4143 | CAATATAATTGGCTATGTTT |
| 4144 | GTTAACACAATATAATTGGC |
| 4145 | GAGTCAGTTAACACAATATA |
| 4146 | GCCAGCATGAGTCAGTTAAC |
| 4147 | ATAAATTGTGTAAAGCCAGC |
| 4148 | TGAAAATCAATATAAATTGT |
| 4149 | CCACCCTGAAAATCAATATA |
| 4150 | GCTGGTTATTACCACCCTGA |
| 4151 | CACAGAAGCTGGTTATTACC |
| 4152 | CCAATCACAGAAGCTGGTTA |
| 4153 | TGCACATGCACACCAATCAC |
| 4154 | CAGGAAGTCTTGCACATGCA |
| 4155 | GGTTAGGCAGGAAGTCTTGC |
| 4156 | ACAAGAAGGATGGGTTAGGC |
| 4157 | AGCTGAGCCACAAGAAGGAT |
| 4158 | TACAAAGCTGAGCCACAAGA |
| 4159 | AGTGTTTACAAAGCTGAGCC |
| 4160 | GGGCCAGTGTTTACAAAGCT |
| 4161 | CACCCAGGGCCAGTGTTTAC |
| 4162 | TCACGGCCACCCAGGGCCAG |
| 4163 | TCTGTTCACGGCCACCCAGG |
| 4164 | TAAGAACTTCTGTTCACGGC |
| 4165 | CTAAGATAAGAACTTCTGTT |
| 4166 | TGCAGTCTAAGATAAGAACT |
| 4167 | GTTGCATGCAGTCTAAGATA |
| 4168 | GATGAGTTGCATGCAGTCTA |
| 4169 | CAGTAGGATGAGTTGCATGC |
| 4170 | GCTTTCAGTGCCAGTAGGAT |
| 4171 | GAAGGGCTTTCAGTGCCAGT |
| 4172 | ACAAAGAAGGGCTTTCAGTG |
| 4173 | GTAGGTGAAGAAAGACAAAG |
| 4174 | TTGCTTAAGTAGGTGAAGAA |
| 4175 | GTAAATTTGCTTAAGTAGGT |
| 4176 | AAAGTGGCTTGTAAATTTGC |
| 4177 | GGCAAAAAGTGGCTTGTAAA |
| 4178 | GAAGAGGCAAAAAGTGGCTT |
| 4179 | TGAGAGAAGAGGCAAAAAGT |
| 4180 | GGCTGCTGAGAGAAGAGGCA |
| 4181 | AAGATGGCTGCTGAGAGAAG |
| 4182 | AAGGACCAAGATGGCTGCTG |
| 4183 | ATTGAAAGGACCAAGATGGC |
| 4184 | CAGGCAACATTGAAAGGACC |
| 4185 | GTGCACACAGGCAACATTGA |
| 4186 | TACAGCATGAGTGCACACAG |
| 4187 | ATAAATACAGCATGAGTGCA |
| 4188 | AGGTCATAAATACAGCATGA |
| 4189 | GAGGGACCAGGTCATAAATA |
| 4190 | TATGAGAGGGACCAGGTCAT |
| 4191 | CTCAAAGTATGAGAGGGACC |
| 4192 | GTTATATCTCAAAGTATGAG |
| 4193 | CTTGAGTTATATCTCAAAGT |
| 4194 | AGAAGGAAGGACTTGAGTTA |
| 4195 | TTCTCAAAGAAGGAAGGACT |
| 4196 | GTATGGATTCTCAAAGAAGG |
| 4197 | CCATCAGTATGGATTCTCAA |
| 4198 | GTGACCCATCAGTATGGATT |
| 4199 | GTATTTAAAAAGTGACCCAT |
| 4200 | GACCTTAAGTATTTAAAAAG |
| 4201 | TGATGCAGACCTTAAGTATT |
| 4202 | TATAATGTTTGATGCAGACC |
| 4203 | AATGTTATAATGTTTGATGC |
| 4204 | GAAGAACAGCAAATGTTATA |
| 4205 | AAAAAGAAGAACAGCAAATG |
| 4206 | GAATAAAAAAGAAGAACAGC |
| 4207 | GTATATAAACCAAGTAAGAA |
| 4208 | AGCTTAGTATATAAACCAAG |
| 4209 | GGATAATAAAGCTTAGTATA |
| 4210 | CTTAAAAGGATAATAAAGCT |
| 4211 | GAGAAAGTTTTAACCTTAAA |
| 4212 | TCCTTGAGAAAGTTTTAACC |
| 4213 | GTTAGTGTCCTTGAGAAAGT |
| 4214 | ACACATTACAGTTAGTGTCC |
| 4215 | CAAGTTGTACACATTACAGT |
| 4216 | ACGCTGGCTACCAAGTTGTA |
| 4217 | CTATGTCAAATGTTACGCTG |
| 4218 | CAAGACACTATGTCAAATGT |
| 4219 | TCTTTTTACAAGACACTATG |
| 4220 | GTATCTTCTTTTTACAAGAC |
| 4221 | AACTGATTGAGTATCTTCTT |
| 4222 | TCAAAAACTGATTGAGTATC |
| 4223 | AATCATTCAAAAACTGATTG |
| 4224 | TACTCTTTGAATCATTCAAA |
| 4225 | GCCATTATTTTACTCTTTGA |
| 4226 | AGAAGTTGCCATTATTTTAC |
| 4227 | GATAAAAGAAGTTGCCATTA |
| 4228 | CACTATGGAAGAGATAAAAG |
| 4229 | GATTGCACTATGGAAGAGAT |
| 4230 | AAAATATTGAAGATTGCACT |
| 4231 | GTTTAAAAAATATTGAAGAT |
| 4232 | CCAATAGTTGTTTAAAAAAT |
| 4233 | AATTCAGCCAATAGTTGTTT |
| 4234 | CACAATGGTAGAATTCAGCC |
| 4235 | CTAAACCACAATGGTAGAAT |
| 4236 | AAGCTCTAAACCACAATGGT |
| 4237 | TCTCAGAGAAAGCTCTAAAC |
| 4238 | CCTTAGCAAAAATGTCTCAG |
| 4239 | TCAAAACCTTAGCAAAAATG |
| 4240 | CCTGTTTCAAAACCTTAGCA |
| 4241 | TGGAACCTGTTTCAAAACCT |
| 4242 | GGACCAATTTGGAACCTGTT |
| 4243 | GTCACTGTGGACCAATTTGG |
| 4244 | CTTGGAGGTCACTGTGGACC |
| 4245 | TAGAGCCTTGGAGGTCACTG |
| 4246 | TCCTGTAGAGCCTTGGAGGT |
| 4247 | ACCACTCCTGTAGAGCCTTG |
| 4248 | CTTGAGGACCACTCCTGTAG |
| 4249 | TGAAGCTTGAGGACCACTCC |
| 4250 | ATGAGCTGAAGCTTGAGGAC |
| 4251 | GGCCCAATGAGCTGAAGCTT |
| 4252 | AGTGGGGCCCAATGAGCTGA |
| 4253 | CTGGGAGTGGGGCCCAATGA |
| 4254 | TTTCCTGAGACCTACTGAAT |
| 4255 | GGTCCTTTCCTGAGACCTAC |
| 4256 | GTTCTTGGTCCTTTCCTGAG |
| 4257 | GGAATGTATGTTCTTGGTCC |
| 4258 | CCAGTAGGAATGTATGTTCT |
| 4259 | ATTACCCAGTAGGAATGTAT |
| 4260 | TCCTCATTACCCAGTAGGAA |
| 4261 | AGCAGCAGCCTCCTCATTAC |
| 4262 | CTACTGGACCAGCAGCAGCC |
| 4263 | TGTGACTACTGGACCAGCAG |
| 4264 | GAAAGTGTGACTACTGGACC |
| 4265 | AGTGGCTCTGAAAGTGTGAC |
| 4266 | TCACAGGGCAGTGGCTCTGA |
| 4267 | CCATGAGCTCACAGGGCAGT |
| 4268 | GGAGTGCCATGAGCTCACAG |
| 4269 | ATCATGGAGTGCCATGAGCT |
| 4270 | TCAGTGTGGCGGGAATCATG |
| 4271 | GGGATTATGTCAGTGTGGCG |
| 4272 | AGCTGGGGATTATGTCAGTG |
| 4273 | ACTGAAGTCAGCTGGGGATT |
| 4274 | GCAAGACTGAAGTCAGCTGG |
| 4275 | ACCTGGAGTGGAGTAAGCAA |
| 4276 | GCTGAACCTGGAGTGGAGTA |
| 4277 | AAGGAAGCTGAACCTGGAGT |
| 4278 | GTATGTAAGGAAGCTGAACC |
| 4279 | ATGCCTGGTGTATGTAAGGA |
| 4280 | AGGAGCATGCCTGGTGTATG |
| 4281 | TGGGCAGGAGCATGCCTGGT |
| 4282 | AAAGCTCTGGGCAGGAGCAT |
| 4283 | AAACCACATGGGCAAAGCTC |
| 4284 | TGGGGAAACCACATGGGCAA |
| 4285 | GTATCTGGGGAAACCACATG |
| 4286 | ACATGGGTATCTGGGGAAAC |
| 4287 | CAAGTACATGGGTATCTGGG |
| 4288 | GTAAAGGAACAAGTACATGG |
| 4289 | GGGAGGTAAAGGAACAAGTA |
| 4290 | CCTGAGGGAGGTAAAGGAAC |
| 4291 | GGAATGACCTGAGGGAGGTA |
| 4292 | GGTGACATATGAGGAATGAC |
| 4293 | GAGATGGTGACATATGAGGA |
| 4294 | CCCACTGAGATGGTGACATA |
| 4295 | AAGGGCCCACTGAGATGGTG |
| 4296 | TATGGAAGGGCCCACTGAGA |
| 4297 | TGGGTTTTATGGAAGGGCCC |
| 4298 | TTTTTAACTGGGTTTTATGG |
| 4299 | TGTTGCCATTTTTAACTGGG |
| 4300 | GAGAAGGATGTTGCCATTTT |
| 4301 | TGAGGGGAGAAGGATGTTGC |
| 4302 | GCGTGTGAGGGGAGAAGGAT |
| 4303 | AGTTAGCGTGTGAGGGGAGA |
| 4304 | TGTGTGTCAGTTAGCGTGTG |
| 4305 | ATGTGTGTGTGTCAGTTAGC |
| 4306 | TGCTGTGTGAGAGAGAGAGT |
| 4307 | GTGTACGTATGCTGTGTGAG |
| 4308 | GGAGTGTGTGTACGTATGCT |
| 4309 | TGATAGGGAGTGTGTGTACG |
| 4310 | GCAGGAAAGGGATATGATAG |
| 4311 | GCATTGCAGGAAAGGGATAT |
| 4312 | TGGAGAAAAGCATTGCAGGA |
| 4313 | TGGTATGGAGAAAAGCATTG |
| 4314 | TCAGATGGTGTAAATGGTAT |
| 4315 | GTGTGGAAGGACACAATT |
| 4316 | GGACACAATTTCTGTAGT |
| 4317 | TGTAGTTTAGTTGACTGC |
| 4318 | AGTTTAGTTGACTGCAGA |
| 4319 | TTAGTTGACTGCAGAGGG |
| 4320 | TAGTTGACTGCAGAGGGA |
| 4321 | TAAAGCAAGCTGTGTGGAA |
| 4322 | GCTGTGTGGAAGGACACAA |
| 4323 | CTGTGTGGAAGGACACAAT |
| 4324 | TGTGTGGAAGGACACAATT |
| 4325 | GTGTGGAAGGACACAATTT |
| 4326 | TGGAAGGACACAATTTCTG |
| 4327 | GGAAGGACACAATTTCTGT |
| 4328 | GAAGGACACAATTTCTGTA |
| 4329 | AAGGACACAATTTCTGTAG |
| 4330 | AGGACACAATTTCTGTAGT |
| 4331 | GGACACAATTTCTGTAGTT |
| 4332 | CACAATTTCTGTAGTTTAG |
| 4333 | ACAATTTCTGTAGTTTAGT |
| 4334 | TTTCTGTAGTTTAGTTGAC |
| 4335 | TCTGTAGTTTAGTTGACTG |
| 4336 | CTGTAGTTTAGTTGACTGC |
| 4337 | TGTAGTTTAGTTGACTGCA |
| 4338 | TAGTTTAGTTGACTGCAGA |
| 4339 | AGTTTAGTTGACTGCAGAG |
| 4340 | GTTTAGTTGACTGCAGAGG |
| 4341 | TTTAGTTGACTGCAGAGGG |
| 4342 | TTAGTTGACTGCAGAGGGA |
| 4343 | TAGTTGACTGCAGAGGGAG |
| 4344 | AGTTGACTGCAGAGGGAGG |
| 4345 | TATTTTTAAAGCAAGCTGTG |
| 4346 | ATTTTTAAAGCAAGCTGTGT |
| 4347 | TTAAAGCAAGCTGTGTGGAA |
| 4348 | TAAAGCAAGCTGTGTGGAAG |
| 4349 | AAGCAAGCTGTGTGGAAGGA |
| 4350 | AGCAAGCTGTGTGGAAGGAC |
| 4351 | AGCTGTGTGGAAGGACACAA |
| 4352 | GCTGTGTGGAAGGACACAAT |
| 4353 | TGTGTGGAAGGACACAATTT |
| 4354 | GTGTGGAAGGACACAATTTC |
| 4355 | TGTGGAAGGACACAATTTCT |
| 4356 | GTGGAAGGACACAATTTCTG |
| 4357 | TGGAAGGACACAATTTCTGT |
| 4358 | GGAAGGACACAATTTCTGTA |
| 4359 | GAAGGACACAATTTCTGTAG |
| 4360 | AAGGACACAATTTCTGTAGT |
| 4361 | AGGACACAATTTCTGTAGTT |
| 4362 | GGACACAATTTCTGTAGTTT |
| 4363 | GACACAATTTCTGTAGTTTA |
| 4364 | ACACAATTTCTGTAGTTTAG |
| 4365 | CACAATTTCTGTAGTTTAGT |
| 4366 | ACAATTTCTGTAGTTTAGTT |
| 4367 | AATTTCTGTAGTTTAGTTGA |
| 4368 | ATTTCTGTAGTTTAGTTGAC |
| 4369 | TTTCTGTAGTTTAGTTGACT |
| 4370 | TTCTGTAGTTTAGTTGACTG |
| 4371 | TCTGTAGTTTAGTTGACTGC |
| 4372 | CTGTAGTTTAGTTGACTGCA |
| 4373 | TGTAGTTTAGTTGACTGCAG |
| 4374 | GTAGTTTAGTTGACTGCAGA |
| 4375 | TAGTTTAGTTGACTGCAGAG |
| 4376 | AGTTTAGTTGACTGCAGAGG |
| 4377 | GTTTAGTTGACTGCAGAGGG |
| 4378 | TTTAGTTGACTGCAGAGGGA |
| 4379 | TTAGTTGACTGCAGAGGGAG |
| 4380 | TAGTTGACTGCAGAGGGAGG |
| 4381 | AGTTGACTGCAGAGGGAGGC |
| 4382 | ATGTATTTTTAAAGCAAGCTG |
| 4383 | GTATTTTTAAAGCAAGCTGTG |
| 4384 | TATTTTTAAAGCAAGCTGTGT |
| 4385 | ATTTTTAAAGCAAGCTGTGTG |
| 4386 | TTTTTAAAGCAAGCTGTGTGG |
| 4387 | TTTAAAGCAAGCTGTGTGGAA |
| 4388 | TTAAAGCAAGCTGTGTGGAAG |
| 4389 | TAAAGCAAGCTGTGTGGAAGG |
| 4390 | AAAGCAAGCTGTGTGGAAGGA |
| 4391 | AAGCAAGCTGTGTGGAAGGAC |
| 4392 | AGCAAGCTGTGTGGAAGGACA |
| 4393 | AAGCTGTGTGGAAGGACACAA |
| 4394 | AGCTGTGTGGAAGGACACAAT |
| 4395 | GCTGTGTGGAAGGACACAATT |
| 4396 | CTGTGTGGAAGGACACAATTT |
| 4397 | TGTGTGGAAGGACACAATTTC |
| 4398 | GTGTGGAAGGACACAATTTCT |
| 4399 | TGTGGAAGGACACAATTTCTG |
| 4400 | GTGGAAGGACACAATTTCTGT |
| 4401 | TGGAAGGACACAATTTCTGTA |
| 4402 | GGAAGGACACAATTTCTGTAG |
| 4403 | GAAGGACACAATTTCTGTAGT |
| 4404 | AAGGACACAATTTCTGTAGTT |
| 4405 | AGGACACAATTTCTGTAGTTT |
| 4406 | GGACACAATTTCTGTAGTTTA |
| 4407 | GACACAATTTCTGTAGTTTAG |
| 4408 | ACACAATTTCTGTAGTTTAGT |
| 4409 | CACAATTTCTGTAGTTTAGTT |
| 4410 | ACAATTTCTGTAGTTTAGTTG |
| 4411 | CAATTTCTGTAGTTTAGTTGA |
| 4412 | AATTTCTGTAGTTTAGTTGAC |
| 4413 | ATTTCTGTAGTTTAGTTGACT |
| 4414 | TTTCTGTAGTTTAGTTGACTG |
| 4415 | TTCTGTAGTTTAGTTGACTGC |
| 4416 | TCTGTAGTTTAGTTGACTGCA |
| 4417 | CTGTAGTTTAGTTGACTGCAG |
| 4418 | TGTAGTTTAGTTGACTGCAGA |
| 4419 | GTAGTTTAGTTGACTGCAGAG |
| 4420 | TAGTTTAGTTGACTGCAGAGG |
| 4421 | AGTTTAGTTGACTGCAGAGGG |
| 4422 | GTTTAGTTGACTGCAGAGGGA |
| 4423 | TTTAGTTGACTGCAGAGGGAG |
| 4424 | TTAGTTGACTGCAGAGGGAGG |
| 4425 | TAGTTGACTGCAGAGGGAGGC |
| 4426 | AGTTGACTGCAGAGGGAGGCA |
| 4427 | GTTGACTGCAGAGGGAGGCAG |
| 4428 | ATGTATTTTTAAAGCAAGCTGT |
| 4429 | TGTATTTTTAAAGCAAGCTGTG |
| 4430 | GTATTTTTAAAGCAAGCTGTGT |
| 4431 | TATTTTTAAAGCAAGCTGTGTG |
| 4432 | ATTTTTAAAGCAAGCTGTGTGG |
| 4433 | TTTTTAAAGCAAGCTGTGTGGA |
| 4434 | TTTTAAAGCAAGCTGTGTGGAA |
| 4435 | TTTAAAGCAAGCTGTGTGGAAG |
| 4436 | TTAAAGCAAGCTGTGTGGAAGG |
| 4437 | TAAAGCAAGCTGTGTGGAAGGA |
| 4438 | AAAGCAAGCTGTGTGGAAGGAC |
| 4439 | AAGCAAGCTGTGTGGAAGGACA |
| 4440 | AGCAAGCTGTGTGGAAGGACAC |
| 4441 | CAAGCTGTGTGGAAGGACACAA |
| 4442 | AAGCTGTGTGGAAGGACACAAT |
| 4443 | AGCTGTGTGGAAGGACACAATT |
| 4444 | GCTGTGTGGAAGGACACAATTT |
| 4445 | CTGTGTGGAAGGACACAATTTC |
| 4446 | TGTGTGGAAGGACACAATTTCT |
| 4447 | GTGTGGAAGGACACAATTTCTG |
| 4448 | TGTGGAAGGACACAATTTCTGT |
| 4449 | GTGGAAGGACACAATTTCTGTA |
| 4450 | TGGAAGGACACAATTTCTGTAG |
| 4451 | GGAAGGACACAATTTCTGTAGT |
| 4452 | GAAGGACACAATTTCTGTAGTT |
| 4453 | AAGGACACAATTTCTGTAGTTT |
| 4454 | AGGACACAATTTCTGTAGTTTA |
| 4455 | GGACACAATTTCTGTAGTTTAG |
| 4456 | GACACAATTTCTGTAGTTTAGT |
| 4457 | ACACAATTTCTGTAGTTTAGTT |
| 4458 | CACAATTTCTGTAGTTTAGTTG |
| 4459 | ACAATTTCTGTAGTTTAGTTGA |
| 4460 | CAATTTCTGTAGTTTAGTTGAC |
| 4461 | AATTTCTGTAGTTTAGTTGACT |
| 4462 | ATTTCTGTAGTTTAGTTGACTG |
| 4463 | TTTCTGTAGTTTAGTTGACTGC |
| 4464 | TTCTGTAGTTTAGTTGACTGCA |
| 4465 | TCTGTAGTTTAGTTGACTGCAG |
| 4466 | CTGTAGTTTAGTTGACTGCAGA |
| 4467 | TGTAGTTTAGTTGACTGCAGAG |
| 4468 | GTAGTTTAGTTGACTGCAGAGG |
| 4469 | TAGTTTAGTTGACTGCAGAGGG |
| 4470 | AGTTTAGTTGACTGCAGAGGGA |
| 4471 | GTTTAGTTGACTGCAGAGGGAG |
| 4472 | TTTAGTTGACTGCAGAGGGAGG |
| 4473 | TTAGTTGACTGCAGAGGGAGGC |
| 4474 | TAGTTGACTGCAGAGGGAGGCA |
| 4475 | AGTTGACTGCAGAGGGAGGCAG |
| 4476 | ATGTATTTTTAAAGCAAGCTGTG |
| 4477 | TGTATTTTTAAAGCAAGCTGTGT |
| 4478 | GTATTTTTAAAGCAAGCTGTGTG |
| 4479 | TATTTTTAAAGCAAGCTGTGTGG |
| 4480 | ATTTTTAAAGCAAGCTGTGTGGA |
| 4481 | TTTTTAAAGCAAGCTGTGTGGAA |
| 4482 | TTTTAAAGCAAGCTGTGTGGAAG |
| 4483 | TTTAAAGCAAGCTGTGTGGAAGG |
| 4484 | TTAAAGCAAGCTGTGTGGAAGGA |
| 4485 | TAAAGCAAGCTGTGTGGAAGGAC |
| 4486 | AAAGCAAGCTGTGTGGAAGGACA |
| 4487 | AAGCAAGCTGTGTGGAAGGACAC |
| 4488 | AGCAAGCTGTGTGGAAGGACACA |
| 4489 | GCAAGCTGTGTGGAAGGACACAA |
| 4490 | CAAGCTGTGTGGAAGGACACAAT |
| 4491 | AAGCTGTGTGGAAGGACACAATT |
| 4492 | AGCTGTGTGGAAGGACACAATTT |
| 4493 | GCTGTGTGGAAGGACACAATTTC |
| 4494 | CTGTGTGGAAGGACACAATTTCT |
| 4495 | TGTGTGGAAGGACACAATTTCTG |
| 4496 | GTGTGGAAGGACACAATTTCTGT |
| 4497 | TGTGGAAGGACACAATTTCTGTA |
| 4498 | GTGGAAGGACACAATTTCTGTAG |
| 4499 | TGGAAGGACACAATTTCTGTAGT |
| 4500 | GGAAGGACACAATTTCTGTAGTT |
| 4501 | GAAGGACACAATTTCTGTAGTTT |
| 4502 | AAGGACACAATTTCTGTAGTTTA |
| 4503 | AGGACACAATTTCTGTAGTTTAG |
| 4504 | GGACACAATTTCTGTAGTTTAGT |
| 4505 | GACACAATTTCTGTAGTTTAGTT |
| 4506 | ACACAATTTCTGTAGTTTAGTTG |
| 4507 | CACAATTTCTGTAGTTTAGTTGA |
| 4508 | ACAATTTCTGTAGTTTAGTTGAC |
| 4509 | CAATTTCTGTAGTTTAGTTGACT |
| 4510 | AATTTCTGTAGTTTAGTTGACTG |
| 4511 | ATTTCTGTAGTTTAGTTGACTGC |
| 4512 | TTTCTGTAGTTTAGTTGACTGCA |
| 4513 | TTCTGTAGTTTAGTTGACTGCAG |
| 4514 | TCTGTAGTTTAGTTGACTGCAGA |
| 4515 | CTGTAGTTTAGTTGACTGCAGAG |
| 4516 | TGTAGTTTAGTTGACTGCAGAGG |
| 4517 | GTAGTTTAGTTGACTGCAGAGGG |
| 4518 | TAGTTTAGTTGACTGCAGAGGGA |
| 4519 | AGTTTAGTTGACTGCAGAGGGAG |
| 4520 | GTTTAGTTGACTGCAGAGGGAGG |
| 4521 | TTTAGTTGACTGCAGAGGGAGGC |
| 4522 | TTAGTTGACTGCAGAGGGAGGCA |
| 4523 | TAGTTGACTGCAGAGGGAGGCAG |
| 4524 | ATGTATTTTTAAAGCAAGCTGTGT |
| 4525 | TGTATTTTTAAAGCAAGCTGTGTG |
| 4526 | GTATTTTTAAAGCAAGCTGTGTGG |
| 4527 | TATTTTTAAAGCAAGCTGTGTGGA |
| 4528 | ATTTTTAAAGCAAGCTGTGTGGAA |
| 4529 | TTTTTAAAGCAAGCTGTGTGGAAG |
| 4530 | TTTTAAAGCAAGCTGTGTGGAAGG |
| 4531 | TTTAAAGCAAGCTGTGTGGAAGGA |
| 4532 | TTAAAGCAAGCTGTGTGGAAGGAC |
| 4533 | TAAAGCAAGCTGTGTGGAAGGACA |
| 4534 | AAAGCAAGCTGTGTGGAAGGACAC |
| 4535 | AAGCAAGCTGTGTGGAAGGACACA |
| 4536 | AGCAAGCTGTGTGGAAGGACACAA |
| 4537 | GCAAGCTGTGTGGAAGGACACAAT |
| 4538 | CAAGCTGTGTGGAAGGACACAATT |
| 4539 | AAGCTGTGTGGAAGGACACAATTT |
| 4540 | AGCTGTGTGGAAGGACACAATTTC |
| 4541 | GCTGTGTGGAAGGACACAATTTCT |
| 4542 | CTGTGTGGAAGGACACAATTTCTG |
| 4543 | TGTGTGGAAGGACACAATTTCTGT |
| 4544 | GTGTGGAAGGACACAATTTCTGTA |
| 4545 | TGTGGAAGGACACAATTTCTGTAG |
| 4546 | GTGGAAGGACACAATTTCTGTAGT |
| 4547 | TGGAAGGACACAATTTCTGTAGTT |
| 4548 | GGAAGGACACAATTTCTGTAGTTT |
| 4549 | GAAGGACACAATTTCTGTAGTTTA |
| 4550 | AAGGACACAATTTCTGTAGTTTAG |
| 4551 | AGGACACAATTTCTGTAGTTTAGT |
| 4552 | GGACACAATTTCTGTAGTTTAGTT |
| 4553 | GACACAATTTCTGTAGTTTAGTTG |
| 4554 | ACACAATTTCTGTAGTTTAGTTGA |
| 4555 | CACAATTTCTGTAGTTTAGTTGAC |
| 4556 | ACAATTTCTGTAGTTTAGTTGACT |
| 4557 | CAATTTCTGTAGTTTAGTTGACTG |
| 4558 | AATTTCTGTAGTTTAGTTGACTGC |
| 4559 | ATTTCTGTAGTTTAGTTGACTGCA |
| 4560 | TTTCTGTAGTTTAGTTGACTGCAG |
| 4561 | TTCTGTAGTTTAGTTGACTGCAGA |
| 4562 | TCTGTAGTTTAGTTGACTGCAGAG |
| 4563 | CTGTAGTTTAGTTGACTGCAGAGG |
| 4564 | TGTAGTTTAGTTGACTGCAGAGGG |
| 4565 | GTAGTTTAGTTGACTGCAGAGGGA |
| 4566 | TAGTTTAGTTGACTGCAGAGGGAG |
| 4567 | AGTTTAGTTGACTGCAGAGGGAGG |
| 4568 | GTTTAGTTGACTGCAGAGGGAGGC |
| 4569 | TTTAGTTGACTGCAGAGGGAGGCA |
| 4570 | TTAGTTGACTGCAGAGGGAGGCAG |
| 4571 | ATGTATTTTTAAAGCAAGCTGTGTG |
| 4572 | TGTATTTTTAAAGCAAGCTGTGTGG |
| 4573 | GTATTTTTAAAGCAAGCTGTGTGGA |
| 4574 | TATTTTTAAAGCAAGCTGTGTGGAA |
| 4575 | ATTTTTAAAGCAAGCTGTGTGGAAG |
| 4576 | TTTTTAAAGCAAGCTGTGTGGAAGG |
| 4577 | TTTTAAAGCAAGCTGTGTGGAAGGA |
| 4578 | TTTAAAGCAAGCTGTGTGGAAGGAC |
| 4579 | TTAAAGCAAGCTGTGTGGAAGGACA |
| 4580 | TAAAGCAAGCTGTGTGGAAGGACAC |
| 4581 | AAAGCAAGCTGTGTGGAAGGACACA |
| 4582 | AAGCAAGCTGTGTGGAAGGACACAA |
| 4583 | AGCAAGCTGTGTGGAAGGACACAAT |
| 4584 | GCAAGCTGTGTGGAAGGACACAATT |
| 4585 | CAAGCTGTGTGGAAGGACACAATTT |
| 4586 | AAGCTGTGTGGAAGGACACAATTTC |
| 4587 | AGCTGTGTGGAAGGACACAATTTCT |
| 4588 | GCTGTGTGGAAGGACACAATTTCTG |
| 4589 | CTGTGTGGAAGGACACAATTTCTGT |
| 4590 | TGTGTGGAAGGACACAATTTCTGTA |
| 4591 | GTGTGGAAGGACACAATTTCTGTAG |
| 4592 | TGTGGAAGGACACAATTTCTGTAGT |
| 4593 | GTGGAAGGACACAATTTCTGTAGTT |
| 4594 | TGGAAGGACACAATTTCTGTAGTTT |
| 4595 | GGAAGGACACAATTTCTGTAGTTTA |
| 4596 | GAAGGACACAATTTCTGTAGTTTAG |
| 4597 | AAGGACACAATTTCTGTAGTTTAGT |
| 4598 | AGGACACAATTTCTGTAGTTTAGTT |
| 4599 | GGACACAATTTCTGTAGTTTAGTTG |
| 4600 | GACACAATTTCTGTAGTTTAGTTGA |
| 4601 | ACACAATTTCTGTAGTTTAGTTGAC |
| 4602 | CACAATTTCTGTAGTTTAGTTGACT |
| 4603 | ACAATTTCTGTAGTTTAGTTGACTG |
| 4604 | CAATTTCTGTAGTTTAGTTGACTGC |
| 4605 | AATTTCTGTAGTTTAGTTGACTGCA |
| 4606 | ATTTCTGTAGTTTAGTTGACTGCAG |
| 4607 | TTTCTGTAGTTTAGTTGACTGCAGA |
| 4608 | TTCTGTAGTTTAGTTGACTGCAGAG |
| 4609 | TCTGTAGTTTAGTTGACTGCAGAGG |
| 4610 | CTGTAGTTTAGTTGACTGCAGAGGG |
| 4611 | TGTAGTTTAGTTGACTGCAGAGGGA |
| 4612 | GTAGTTTAGTTGACTGCAGAGGGAG |
| 4613 | TAGTTTAGTTGACTGCAGAGGGAGG |
| 4614 | AGTTTAGTTGACTGCAGAGGGAGGC |
| 4615 | GTTTAGTTGACTGCAGAGGGAGGCA |
| 4616 | TTTAGTTGACTGCAGAGGGAGGCAG |
| 4617 | ATGTATTTTTAAAGCAAGCTGTGTGG |
| 4618 | TGTATTTTTAAAGCAAGCTGTGTGGA |
| 4619 | GTATTTTTAAAGCAAGCTGTGTGGAA |
| 4620 | TATTTTTAAAGCAAGCTGTGTGGAAG |
| 4621 | ATTTTTAAAGCAAGCTGTGTGGAAGG |
| 4622 | TTTTTAAAGCAAGCTGTGTGGAAGGA |
| 4623 | TTTTAAAGCAAGCTGTGTGGAAGGAC |
| 4624 | TTTAAAGCAAGCTGTGTGGAAGGACA |
| 4625 | TTAAAGCAAGCTGTGTGGAAGGACAC |
| 4626 | TAAAGCAAGCTGTGTGGAAGGACACA |
| 4627 | AAAGCAAGCTGTGTGGAAGGACACAA |
| 4628 | AAGCAAGCTGTGTGGAAGGACACAAT |
| 4629 | AGCAAGCTGTGTGGAAGGACACAATT |
| 4630 | GCAAGCTGTGTGGAAGGACACAATTT |
| 4631 | CAAGCTGTGTGGAAGGACACAATTTC |
| 4632 | AAGCTGTGTGGAAGGACACAATTTCT |
| 4633 | AGCTGTGTGGAAGGACACAATTTCTG |
| 4634 | GCTGTGTGGAAGGACACAATTTCTGT |
| 4635 | CTGTGTGGAAGGACACAATTTCTGTA |
| 4636 | TGTGTGGAAGGACACAATTTCTGTAG |
| 4637 | GTGTGGAAGGACACAATTTCTGTAGT |
| 4638 | TGTGGAAGGACACAATTTCTGTAGTT |
| 4639 | GTGGAAGGACACAATTTCTGTAGTTT |
| 4640 | TGGAAGGACACAATTTCTGTAGTTTA |
| 4641 | GGAAGGACACAATTTCTGTAGTTTAG |
| 4642 | GAAGGACACAATTTCTGTAGTTTAGT |
| 4643 | AAGGACACAATTTCTGTAGTTTAGTT |
| 4644 | AGGACACAATTTCTGTAGTTTAGTTG |
| 4645 | GGACACAATTTCTGTAGTTTAGTTGA |
| 4646 | GACACAATTTCTGTAGTTTAGTTGAC |
| 4647 | ACACAATTTCTGTAGTTTAGTTGACT |
| 4648 | CACAATTTCTGTAGTTTAGTTGACTG |
| 4649 | ACAATTTCTGTAGTTTAGTTGACTGC |
| 4650 | CAATTTCTGTAGTTTAGTTGACTGCA |
| 4651 | AATTTCTGTAGTTTAGTTGACTGCAG |
| 4652 | ATTTCTGTAGTTTAGTTGACTGCAGA |
| 4653 | TTTCTGTAGTTTAGTTGACTGCAGAG |
| 4654 | TTCTGTAGTTTAGTTGACTGCAGAGG |
| 4655 | TCTGTAGTTTAGTTGACTGCAGAGGG |
| 4656 | CTGTAGTTTAGTTGACTGCAGAGGGA |
| 4657 | TGTAGTTTAGTTGACTGCAGAGGGAG |
| 4658 | GTAGTTTAGTTGACTGCAGAGGGAGG |
| 4659 | TAGTTTAGTTGACTGCAGAGGGAGGC |
| 4660 | AGTTTAGTTGACTGCAGAGGGAGGCA |
| 4661 | GTTTAGTTGACTGCAGAGGGAGGCAG |
| 4662 | AGCTCTACCATCCTCAAC |
| 4663 | CAGGCTGACAGAAGCTCTA |
| 4664 | AGGCTGACAGAAGCTCTAC |
| 4665 | GACAGAAGCTCTACCATCC |
| 4666 | ACAGAAGCTCTACCATCCT |
| 4667 | AGAAGCTCTACCATCCTCA |
| 4668 | AAGCTCTACCATCCTCAAC |
| 4669 | AGCTCTACCATCCTCAACA |
| 4670 | CATGTGGCTTTTAAGGTCT |
| 4671 | TGTGGCTTTTAAGGTCTCC |
| 4672 | CCCAGGCTGACAGAAGCTCT |
| 4673 | CCAGGCTGACAGAAGCTCTA |
| 4674 | CAGGCTGACAGAAGCTCTAC |
| 4675 | GGCTGACAGAAGCTCTACCA |
| 4676 | GCTGACAGAAGCTCTACCAT |
| 4677 | TGACAGAAGCTCTACCATCC |
| 4678 | GACAGAAGCTCTACCATCCT |
| 4679 | ACAGAAGCTCTACCATCCTC |
| 4680 | CAGAAGCTCTACCATCCTCA |
| 4681 | AGAAGCTCTACCATCCTCAA |
| 4682 | AAGCTCTACCATCCTCAACA |
| 4683 | AGCTCTACCATCCTCAACAT |
| 4684 | GCTCTACCATCCTCAACATG |
| 4685 | ACATGTGGCTTTTAAGGTCT |
| 4686 | ATGTGGCTTTTAAGGTCTCC |
| 4687 | CAGAGACCCAGGCTGACAGAA |
| 4688 | AGAGACCCAGGCTGACAGAAG |
| 4689 | GAGACCCAGGCTGACAGAAGC |
| 4690 | ACCCAGGCTGACAGAAGCTCT |
| 4691 | CCCAGGCTGACAGAAGCTCTA |
| 4692 | CCAGGCTGACAGAAGCTCTAC |
| 4693 | CAGGCTGACAGAAGCTCTACC |
| 4694 | AGGCTGACAGAAGCTCTACCA |
| 4695 | GGCTGACAGAAGCTCTACCAT |
| 4696 | GCTGACAGAAGCTCTACCATC |
| 4697 | CTGACAGAAGCTCTACCATCC |
| 4698 | TGACAGAAGCTCTACCATCCT |
| 4699 | GACAGAAGCTCTACCATCCTC |
| 4700 | ACAGAAGCTCTACCATCCTCA |
| 4701 | CAGAAGCTCTACCATCCTCAA |
| 4702 | AGAAGCTCTACCATCCTCAAC |
| 4703 | GAAGCTCTACCATCCTCAACA |
| 4704 | AAGCTCTACCATCCTCAACAT |
| 4705 | AGCTCTACCATCCTCAACATG |
| 4706 | GCTCTACCATCCTCAACATGT |
| 4707 | TCCTCAACATGTGGCTTTTAA |
| 4708 | CCTCAACATGTGGCTTTTAAG |
| 4709 | AACATGTGGCTTTTAAGGTCT |
| 4710 | ACATGTGGCTTTTAAGGTCTC |
| 4711 | CATGTGGCTTTTAAGGTCTCC |
| 4712 | TTCAGAGACCCAGGCTGACAGA |
| 4713 | TCAGAGACCCAGGCTGACAGAA |
| 4714 | CAGAGACCCAGGCTGACAGAAG |
| 4715 | AGAGACCCAGGCTGACAGAAGC |
| 4716 | GAGACCCAGGCTGACAGAAGCT |
| 4717 | AGACCCAGGCTGACAGAAGCTC |
| 4718 | GACCCAGGCTGACAGAAGCTCT |
| 4719 | ACCCAGGCTGACAGAAGCTCTA |
| 4720 | CCCAGGCTGACAGAAGCTCTAC |
| 4721 | CCAGGCTGACAGAAGCTCTACC |
| 4722 | CAGGCTGACAGAAGCTCTACCA |
| 4723 | AGGCTGACAGAAGCTCTACCAT |
| 4724 | GGCTGACAGAAGCTCTACCATC |
| 4725 | GCTGACAGAAGCTCTACCATCC |
| 4726 | CTGACAGAAGCTCTACCATCCT |
| 4727 | TGACAGAAGCTCTACCATCCTC |
| 4728 | GACAGAAGCTCTACCATCCTCA |
| 4729 | ACAGAAGCTCTACCATCCTCAA |
| 4730 | CAGAAGCTCTACCATCCTCAAC |
| 4731 | AGAAGCTCTACCATCCTCAACA |
| 4732 | GAAGCTCTACCATCCTCAACAT |
| 4733 | AAGCTCTACCATCCTCAACATG |
| 4734 | AGCTCTACCATCCTCAACATGT |
| 4735 | GCTCTACCATCCTCAACATGTG |
| 4736 | ATCCTCAACATGTGGCTTTTAA |
| 4737 | TCCTCAACATGTGGCTTTTAAG |
| 4738 | CCTCAACATGTGGCTTTTAAGG |
| 4739 | CAACATGTGGCTTTTAAGGTCT |
| 4740 | AACATGTGGCTTTTAAGGTCTC |
| 4741 | ACATGTGGCTTTTAAGGTCTCC |
| 4742 | GTCATTCAGAGACCCAGGCTGAC |
| 4743 | ATTCAGAGACCCAGGCTGACAGA |
| 4744 | TTCAGAGACCCAGGCTGACAGAA |
| 4745 | TCAGAGACCCAGGCTGACAGAAG |
| 4746 | CAGAGACCCAGGCTGACAGAAGC |
| 4747 | AGAGACCCAGGCTGACAGAAGCT |
| 4748 | GAGACCCAGGCTGACAGAAGCTC |
| 4749 | AGACCCAGGCTGACAGAAGCTCT |
| 4750 | GACCCAGGCTGACAGAAGCTCTA |
| 4751 | ACCCAGGCTGACAGAAGCTCTAC |
| 4752 | CCCAGGCTGACAGAAGCTCTACC |
| 4753 | CCAGGCTGACAGAAGCTCTACCA |
| 4754 | CAGGCTGACAGAAGCTCTACCAT |
| 4755 | AGGCTGACAGAAGCTCTACCATC |
| 4756 | GGCTGACAGAAGCTCTACCATCC |
| 4757 | GCTGACAGAAGCTCTACCATCCT |
| 4758 | CTGACAGAAGCTCTACCATCCTC |
| 4759 | TGACAGAAGCTCTACCATCCTCA |
| 4760 | GACAGAAGCTCTACCATCCTCAA |
| 4761 | ACAGAAGCTCTACCATCCTCAAC |
| 4762 | CAGAAGCTCTACCATCCTCAACA |
| 4763 | AGAAGCTCTACCATCCTCAACAT |
| 4764 | GAAGCTCTACCATCCTCAACATG |
| 4765 | AAGCTCTACCATCCTCAACATGT |
| 4766 | AGCTCTACCATCCTCAACATGTG |
| 4767 | GCTCTACCATCCTCAACATGTGG |
| 4768 | CATCCTCAACATGTGGCTTTTAA |
| 4769 | ATCCTCAACATGTGGCTTTTAAG |
| 4770 | TCCTCAACATGTGGCTTTTAAGG |
| 4771 | CCTCAACATGTGGCTTTTAAGGT |
| 4772 | TCAACATGTGGCTTTTAAGGTCT |
| 4773 | CAACATGTGGCTTTTAAGGTCTC |
| 4774 | AACATGTGGCTTTTAAGGTCTCC |
| 4775 | TGCAGTCATTCAGAGACCCAGGCT |
| 4776 | GCAGTCATTCAGAGACCCAGGCTG |
| 4777 | AGTCATTCAGAGACCCAGGCTGAC |
| 4778 | GTCATTCAGAGACCCAGGCTGACA |
| 4779 | CATTCAGAGACCCAGGCTGACAGA |
| 4780 | ATTCAGAGACCCAGGCTGACAGAA |
| 4781 | TTCAGAGACCCAGGCTGACAGAAG |
| 4782 | TCAGAGACCCAGGCTGACAGAAGC |
| 4783 | CAGAGACCCAGGCTGACAGAAGCT |
| 4784 | AGAGACCCAGGCTGACAGAAGCTC |
| 4785 | GAGACCCAGGCTGACAGAAGCTCT |
| 4786 | AGACCCAGGCTGACAGAAGCTCTA |
| 4787 | GACCCAGGCTGACAGAAGCTCTAC |
| 4788 | ACCCAGGCTGACAGAAGCTCTACC |
| 4789 | CCCAGGCTGACAGAAGCTCTACCA |
| 4790 | CCAGGCTGACAGAAGCTCTACCAT |
| 4791 | CAGGCTGACAGAAGCTCTACCATC |
| 4792 | AGGCTGACAGAAGCTCTACCATCC |
| 4793 | GGCTGACAGAAGCTCTACCATCCT |
| 4794 | GCTGACAGAAGCTCTACCATCCTC |
| 4795 | CTGACAGAAGCTCTACCATCCTCA |
| 4796 | TGACAGAAGCTCTACCATCCTCAA |
| 4797 | GACAGAAGCTCTACCATCCTCAAC |
| 4798 | ACAGAAGCTCTACCATCCTCAACA |
| 4799 | CAGAAGCTCTACCATCCTCAACAT |
| 4800 | AGAAGCTCTACCATCCTCAACATG |
| 4801 | GAAGCTCTACCATCCTCAACATGT |
| 4802 | AAGCTCTACCATCCTCAACATGTG |
| 4803 | AGCTCTACCATCCTCAACATGTGG |
| 4804 | GCTCTACCATCCTCAACATGTGGC |
| 4805 | ACCATCCTCAACATGTGGCTTTTA |
| 4806 | CCATCCTCAACATGTGGCTTTTAA |
| 4807 | CATCCTCAACATGTGGCTTTTAAG |
| 4808 | ATCCTCAACATGTGGCTTTTAAGG |
| 4809 | TCCTCAACATGTGGCTTTTAAGGT |
| 4810 | CCTCAACATGTGGCTTTTAAGGTC |
| 4811 | CTCAACATGTGGCTTTTAAGGTCT |
| 4812 | TCAACATGTGGCTTTTAAGGTCTC |
| 4813 | CAACATGTGGCTTTTAAGGTCTCC |
| 4814 | ATGCAGTCATTCAGAGACCCAGGCT |
| 4815 | TGCAGTCATTCAGAGACCCAGGCTG |
| 4816 | GCAGTCATTCAGAGACCCAGGCTGA |
| 4817 | CAGTCATTCAGAGACCCAGGCTGAC |
| 4818 | AGTCATTCAGAGACCCAGGCTGACA |
| 4819 | GTCATTCAGAGACCCAGGCTGACAG |
| 4820 | TCATTCAGAGACCCAGGCTGACAGA |
| 4821 | CATTCAGAGACCCAGGCTGACAGAA |
| 4822 | ATTCAGAGACCCAGGCTGACAGAAG |
| 4823 | TTCAGAGACCCAGGCTGACAGAAGC |
| 4824 | TCAGAGACCCAGGCTGACAGAAGCT |
| 4825 | CAGAGACCCAGGCTGACAGAAGCTC |
| 4826 | AGAGACCCAGGCTGACAGAAGCTCT |
| 4827 | GAGACCCAGGCTGACAGAAGCTCTA |
| 4828 | AGACCCAGGCTGACAGAAGCTCTAC |
| 4829 | GACCCAGGCTGACAGAAGCTCTACC |
| 4830 | ACCCAGGCTGACAGAAGCTCTACCA |
| 4831 | CCCAGGCTGACAGAAGCTCTACCAT |
| 4832 | CCAGGCTGACAGAAGCTCTACCATC |
| 4833 | CAGGCTGACAGAAGCTCTACCATCC |
| 4834 | AGGCTGACAGAAGCTCTACCATCCT |
| 4835 | GGCTGACAGAAGCTCTACCATCCTC |
| 4836 | GCTGACAGAAGCTCTACCATCCTCA |
| 4837 | CTGACAGAAGCTCTACCATCCTCAA |
| 4838 | TGACAGAAGCTCTACCATCCTCAAC |
| 4839 | GACAGAAGCTCTACCATCCTCAACA |
| 4840 | ACAGAAGCTCTACCATCCTCAACAT |
| 4841 | CAGAAGCTCTACCATCCTCAACATG |
| 4842 | AGAAGCTCTACCATCCTCAACATGT |
| 4843 | GAAGCTCTACCATCCTCAACATGTG |
| 4844 | AAGCTCTACCATCCTCAACATGTGG |
| 4845 | AGCTCTACCATCCTCAACATGTGGC |
| 4846 | GCTCTACCATCCTCAACATGTGGCT |
| 4847 | TACCATCCTCAACATGTGGCTTTTA |
| 4848 | ACCATCCTCAACATGTGGCTTTTAA |
| 4849 | CCATCCTCAACATGTGGCTTTTAAG |
| 4850 | CATCCTCAACATGTGGCTTTTAAGG |
| 4851 | ATCCTCAACATGTGGCTTTTAAGGT |
| 4852 | TCCTCAACATGTGGCTTTTAAGGTC |
| 4853 | CCTCAACATGTGGCTTTTAAGGTCT |
| 4854 | CTCAACATGTGGCTTTTAAGGTCTC |
| 4855 | TCAACATGTGGCTTTTAAGGTCTCC |
| 4856 | CATGCAGTCATTCAGAGACCCAGGCT |
| 4857 | ATGCAGTCATTCAGAGACCCAGGCTG |
| 4858 | TGCAGTCATTCAGAGACCCAGGCTGA |
| 4859 | GCAGTCATTCAGAGACCCAGGCTGAC |
| 4860 | CAGTCATTCAGAGACCCAGGCTGACA |
| 4861 | AGTCATTCAGAGACCCAGGCTGACAG |
| 4862 | GTCATTCAGAGACCCAGGCTGACAGA |
| 4863 | TCATTCAGAGACCCAGGCTGACAGAA |
| 4864 | CATTCAGAGACCCAGGCTGACAGAAG |
| 4865 | ATTCAGAGACCCAGGCTGACAGAAGC |
| 4866 | TTCAGAGACCCAGGCTGACAGAAGCT |
| 4867 | TCAGAGACCCAGGCTGACAGAAGCTC |
| 4868 | CAGAGACCCAGGCTGACAGAAGCTCT |
| 4869 | AGAGACCCAGGCTGACAGAAGCTCTA |
| 4870 | GAGACCCAGGCTGACAGAAGCTCTAC |
| 4871 | AGACCCAGGCTGACAGAAGCTCTACC |
| 4872 | GACCCAGGCTGACAGAAGCTCTACCA |
| 4873 | ACCCAGGCTGACAGAAGCTCTACCAT |
| 4874 | CCCAGGCTGACAGAAGCTCTACCATC |
| 4875 | CCAGGCTGACAGAAGCTCTACCATCC |
| 4876 | CAGGCTGACAGAAGCTCTACCATCCT |
| 4877 | AGGCTGACAGAAGCTCTACCATCCTC |
| 4878 | GGCTGACAGAAGCTCTACCATCCTCA |
| 4879 | GCTGACAGAAGCTCTACCATCCTCAA |
| 4880 | CTGACAGAAGCTCTACCATCCTCAAC |
| 4881 | TGACAGAAGCTCTACCATCCTCAACA |
| 4882 | GACAGAAGCTCTACCATCCTCAACAT |
| 4883 | ACAGAAGCTCTACCATCCTCAACATG |
| 4884 | CAGAAGCTCTACCATCCTCAACATGT |
| 4885 | AGAAGCTCTACCATCCTCAACATGTG |
| 4886 | GAAGCTCTACCATCCTCAACATGTGG |
| 4887 | AAGCTCTACCATCCTCAACATGTGGC |
| 4888 | AGCTCTACCATCCTCAACATGTGGCT |
| 4889 | GCTCTACCATCCTCAACATGTGGCTT |
| 4890 | CTACCATCCTCAACATGTGGCTTTTA |
| 4891 | TACCATCCTCAACATGTGGCTTTTAA |
| 4892 | ACCATCCTCAACATGTGGCTTTTAAG |
| 4893 | CCATCCTCAACATGTGGCTTTTAAGG |
| 4894 | CATCCTCAACATGTGGCTTTTAAGGT |
| 4895 | ATCCTCAACATGTGGCTTTTAAGGTC |
| 4896 | TCCTCAACATGTGGCTTTTAAGGTCT |
| 4897 | CCTCAACATGTGGCTTTTAAGGTCTC |
| 4898 | CTCAACATGTGGCTTTTAAGGTCTCC |
| 4899 | GGCTCTGAAAGTGTGACT |
| 4900 | CTCTGAAAGTGTGACTAC |
| 4901 | TCTGAAAGTGTGACTACT |
| 4902 | CTGAAAGTGTGACTACTG |
| 4903 | AAGTGTGACTACTGGACC |
| 4904 | GTGTGACTACTGGACCAG |
| 4905 | TGACTACTGGACCAGCAG |
| 4906 | ACTACTGGACCAGCAGCA |
| 4907 | GCCATGAGCTCACAGGGCA |
| 4908 | CCATGAGCTCACAGGGCAG |
| 4909 | CATGAGCTCACAGGGCAGT |
| 4910 | ATGAGCTCACAGGGCAGTG |
| 4911 | GTGGCTCTGAAAGTGTGAC |
| 4912 | TGGCTCTGAAAGTGTGACT |
| 4913 | GGCTCTGAAAGTGTGACTA |
| 4914 | GCTCTGAAAGTGTGACTAC |
| 4915 | CTCTGAAAGTGTGACTACT |
| 4916 | TCTGAAAGTGTGACTACTG |
| 4917 | CTGAAAGTGTGACTACTGG |
| 4918 | GAAAGTGTGACTACTGGAC |
| 4919 | AAAGTGTGACTACTGGACC |
| 4920 | AAGTGTGACTACTGGACCA |
| 4921 | AGTGTGACTACTGGACCAG |
| 4922 | GTGTGACTACTGGACCAGC |
| 4923 | GTGACTACTGGACCAGCAG |
| 4924 | TGACTACTGGACCAGCAGC |
| 4925 | GACTACTGGACCAGCAGCA |
| 4926 | ACTACTGGACCAGCAGCAG |
| 4927 | ACTGGACCAGCAGCAGCCT |
| 4928 | AGCAGCAGCCTCCTCATTA |
| 4929 | TGCCATGAGCTCACAGGGCA |
| 4930 | GCCATGAGCTCACAGGGCAG |
| 4931 | CATGAGCTCACAGGGCAGTG |
| 4932 | ATGAGCTCACAGGGCAGTGG |
| 4933 | TGAGCTCACAGGGCAGTGGC |
| 4934 | GAGCTCACAGGGCAGTGGCT |
| 4935 | CTCACAGGGCAGTGGCTCTG |
| 4936 | CACAGGGCAGTGGCTCTGAA |
| 4937 | GTGGCTCTGAAAGTGTGACT |
| 4938 | TGGCTCTGAAAGTGTGACTA |
| 4939 | GGCTCTGAAAGTGTGACTAC |
| 4940 | GCTCTGAAAGTGTGACTACT |
| 4941 | CTCTGAAAGTGTGACTACTG |
| 4942 | TCTGAAAGTGTGACTACTGG |
| 4943 | CTGAAAGTGTGACTACTGGA |
| 4944 | TGAAAGTGTGACTACTGGAC |
| 4945 | AAAGTGTGACTACTGGACCA |
| 4946 | AAGTGTGACTACTGGACCAG |
| 4947 | AGTGTGACTACTGGACCAGC |
| 4948 | GTGTGACTACTGGACCAGCA |
| 4949 | GTGACTACTGGACCAGCAGC |
| 4950 | TGACTACTGGACCAGCAGCA |
| 4951 | GACTACTGGACCAGCAGCAG |
| 4952 | ACTACTGGACCAGCAGCAGC |
| 4953 | TACTGGACCAGCAGCAGCCT |
| 4954 | ACTGGACCAGCAGCAGCCTC |
| 4955 | ACCAGCAGCAGCCTCCTCAT |
| 4956 | CAGCAGCAGCCTCCTCATTA |
| 4957 | AGTGCCATGAGCTCACAGGGC |
| 4958 | GTGCCATGAGCTCACAGGGCA |
| 4959 | TGCCATGAGCTCACAGGGCAG |
| 4960 | GCCATGAGCTCACAGGGCAGT |
| 4961 | CCATGAGCTCACAGGGCAGTG |
| 4962 | CATGAGCTCACAGGGCAGTGG |
| 4963 | ATGAGCTCACAGGGCAGTGGC |
| 4964 | TGAGCTCACAGGGCAGTGGCT |
| 4965 | GAGCTCACAGGGCAGTGGCTC |
| 4966 | AGCTCACAGGGCAGTGGCTCT |
| 4967 | GCTCACAGGGCAGTGGCTCTG |
| 4968 | CTCACAGGGCAGTGGCTCTGA |
| 4969 | TCACAGGGCAGTGGCTCTGAA |
| 4970 | CACAGGGCAGTGGCTCTGAAA |
| 4971 | ACAGGGCAGTGGCTCTGAAAG |
| 4972 | CAGGGCAGTGGCTCTGAAAGT |
| 4973 | CAGTGGCTCTGAAAGTGTGAC |
| 4974 | AGTGGCTCTGAAAGTGTGACT |
| 4975 | GTGGCTCTGAAAGTGTGACTA |
| 4976 | TGGCTCTGAAAGTGTGACTAC |
| 4977 | GGCTCTGAAAGTGTGACTACT |
| 4978 | GCTCTGAAAGTGTGACTACTG |
| 4979 | CTCTGAAAGTGTGACTACTGG |
| 4980 | TCTGAAAGTGTGACTACTGGA |
| 4981 | CTGAAAGTGTGACTACTGGAC |
| 4982 | TGAAAGTGTGACTACTGGACC |
| 4983 | GAAAGTGTGACTACTGGACCA |
| 4984 | AAAGTGTGACTACTGGACCAG |
| 4985 | AAGTGTGACTACTGGACCAGC |
| 4986 | AGTGTGACTACTGGACCAGCA |
| 4987 | GTGTGACTACTGGACCAGCAG |
| 4988 | TGTGACTACTGGACCAGCAGC |
| 4989 | GTGACTACTGGACCAGCAGCA |
| 4990 | TGACTACTGGACCAGCAGCAG |
| 4991 | GACTACTGGACCAGCAGCAGC |
| 4992 | ACTACTGGACCAGCAGCAGCC |
| 4993 | CTACTGGACCAGCAGCAGCCT |
| 4994 | TACTGGACCAGCAGCAGCCTC |
| 4995 | ACTGGACCAGCAGCAGCCTCC |
| 4996 | GACCAGCAGCAGCCTCCTCAT |
| 4997 | ACCAGCAGCAGCCTCCTCATT |
| 4998 | CCAGCAGCAGCCTCCTCATTA |
| 4999 | CAGCAGCAGCCTCCTCATTAC |
| 5000 | AGTGCCATGAGCTCACAGGGCA |
| 5001 | GTGCCATGAGCTCACAGGGCAG |
| 5002 | TGCCATGAGCTCACAGGGCAGT |
| 5003 | GCCATGAGCTCACAGGGCAGTG |
| 5004 | CCATGAGCTCACAGGGCAGTGG |
| 5005 | CATGAGCTCACAGGGCAGTGGC |
| 5006 | ATGAGCTCACAGGGCAGTGGCT |
| 5007 | TGAGCTCACAGGGCAGTGGCTC |
| 5008 | GAGCTCACAGGGCAGTGGCTCT |
| 5009 | AGCTCACAGGGCAGTGGCTCTG |
| 5010 | GCTCACAGGGCAGTGGCTCTGA |
| 5011 | CTCACAGGGCAGTGGCTCTGAA |
| 5012 | TCACAGGGCAGTGGCTCTGAAA |
| 5013 | CACAGGGCAGTGGCTCTGAAAG |
| 5014 | ACAGGGCAGTGGCTCTGAAAGT |
| 5015 | CAGGGCAGTGGCTCTGAAAGTG |
| 5016 | GGCAGTGGCTCTGAAAGTGTGA |
| 5017 | GCAGTGGCTCTGAAAGTGTGAC |
| 5018 | CAGTGGCTCTGAAAGTGTGACT |
| 5019 | AGTGGCTCTGAAAGTGTGACTA |
| 5020 | GTGGCTCTGAAAGTGTGACTAC |
| 5021 | TGGCTCTGAAAGTGTGACTACT |
| 5022 | GGCTCTGAAAGTGTGACTACTG |
| 5023 | GCTCTGAAAGTGTGACTACTGG |
| 5024 | CTCTGAAAGTGTGACTACTGGA |
| 5025 | TCTGAAAGTGTGACTACTGGAC |
| 5026 | CTGAAAGTGTGACTACTGGACC |
| 5027 | TGAAAGTGTGACTACTGGACCA |
| 5028 | GAAAGTGTGACTACTGGACCAG |
| 5029 | AAAGTGTGACTACTGGACCAGC |
| 5030 | AAGTGTGACTACTGGACCAGCA |
| 5031 | AGTGTGACTACTGGACCAGCAG |
| 5032 | GTGTGACTACTGGACCAGCAGC |
| 5033 | TGTGACTACTGGACCAGCAGCA |
| 5034 | GTGACTACTGGACCAGCAGCAG |
| 5035 | TGACTACTGGACCAGCAGCAGC |
| 5036 | GACTACTGGACCAGCAGCAGCC |
| 5037 | ACTACTGGACCAGCAGCAGCCT |
| 5038 | CTACTGGACCAGCAGCAGCCTC |
| 5039 | TACTGGACCAGCAGCAGCCTCC |
| 5040 | ACTGGACCAGCAGCAGCCTCCT |
| 5041 | GGACCAGCAGCAGCCTCCTCAT |
| 5042 | GACCAGCAGCAGCCTCCTCATT |
| 5043 | ACCAGCAGCAGCCTCCTCATTA |
| 5044 | CCAGCAGCAGCCTCCTCATTAC |
| 5045 | AGTGCCATGAGCTCACAGGGCAG |
| 5046 | GTGCCATGAGCTCACAGGGCAGT |
| 5047 | TGCCATGAGCTCACAGGGCAGTG |
| 5048 | GCCATGAGCTCACAGGGCAGTGG |
| 5049 | CCATGAGCTCACAGGGCAGTGGC |
| 5050 | CATGAGCTCACAGGGCAGTGGCT |
| 5051 | ATGAGCTCACAGGGCAGTGGCTC |
| 5052 | TGAGCTCACAGGGCAGTGGCTCT |
| 5053 | GAGCTCACAGGGCAGTGGCTCTG |
| 5054 | AGCTCACAGGGCAGTGGCTCTGA |
| 5055 | GCTCACAGGGCAGTGGCTCTGAA |
| 5056 | CTCACAGGGCAGTGGCTCTGAAA |
| 5057 | TCACAGGGCAGTGGCTCTGAAAG |
| 5058 | CACAGGGCAGTGGCTCTGAAAGT |
| 5059 | ACAGGGCAGTGGCTCTGAAAGTG |
| 5060 | CAGGGCAGTGGCTCTGAAAGTGT |
| 5061 | GGGCAGTGGCTCTGAAAGTGTGA |
| 5062 | GGCAGTGGCTCTGAAAGTGTGAC |
| 5063 | GCAGTGGCTCTGAAAGTGTGACT |
| 5064 | CAGTGGCTCTGAAAGTGTGACTA |
| 5065 | AGTGGCTCTGAAAGTGTGACTAC |
| 5066 | GTGGCTCTGAAAGTGTGACTACT |
| 5067 | TGGCTCTGAAAGTGTGACTACTG |
| 5068 | GGCTCTGAAAGTGTGACTACTGG |
| 5069 | GCTCTGAAAGTGTGACTACTGGA |
| 5070 | CTCTGAAAGTGTGACTACTGGAC |
| 5071 | TCTGAAAGTGTGACTACTGGACC |
| 5072 | CTGAAAGTGTGACTACTGGACCA |
| 5073 | TGAAAGTGTGACTACTGGACCAG |
| 5074 | GAAAGTGTGACTACTGGACCAGC |
| 5075 | AAAGTGTGACTACTGGACCAGCA |
| 5076 | AAGTGTGACTACTGGACCAGCAG |
| 5077 | AGTGTGACTACTGGACCAGCAGC |
| 5078 | GTGTGACTACTGGACCAGCAGCA |
| 5079 | TGTGACTACTGGACCAGCAGCAG |
| 5080 | GTGACTACTGGACCAGCAGCAGC |
| 5081 | TGACTACTGGACCAGCAGCAGCC |
| 5082 | GACTACTGGACCAGCAGCAGCCT |
| 5083 | ACTACTGGACCAGCAGCAGCCTC |
| 5084 | CTACTGGACCAGCAGCAGCCTCC |
| 5085 | TACTGGACCAGCAGCAGCCTCCT |
| 5086 | ACTGGACCAGCAGCAGCCTCCTC |
| 5087 | TGGACCAGCAGCAGCCTCCTCAT |
| 5088 | GGACCAGCAGCAGCCTCCTCATT |
| 5089 | GACCAGCAGCAGCCTCCTCATTA |
| 5090 | ACCAGCAGCAGCCTCCTCATTAC |
| 5091 | AGTGCCATGAGCTCACAGGGCAGT |
| 5092 | GTGCCATGAGCTCACAGGGCAGTG |
| 5093 | TGCCATGAGCTCACAGGGCAGTGG |
| 5094 | GCCATGAGCTCACAGGGCAGTGGC |
| 5095 | CCATGAGCTCACAGGGCAGTGGCT |
| 5096 | CATGAGCTCACAGGGCAGTGGCTC |
| 5097 | ATGAGCTCACAGGGCAGTGGCTCT |
| 5098 | TGAGCTCACAGGGCAGTGGCTCTG |
| 5099 | GAGCTCACAGGGCAGTGGCTCTGA |
| 5100 | AGCTCACAGGGCAGTGGCTCTGAA |
| 5101 | GCTCACAGGGCAGTGGCTCTGAAA |
| 5102 | CTCACAGGGCAGTGGCTCTGAAAG |
| 5103 | TCACAGGGCAGTGGCTCTGAAAGT |
| 5104 | CACAGGGCAGTGGCTCTGAAAGTG |
| 5105 | ACAGGGCAGTGGCTCTGAAAGTGT |
| 5106 | CAGGGCAGTGGCTCTGAAAGTGTG |
| 5107 | AGGGCAGTGGCTCTGAAAGTGTGA |
| 5108 | GGGCAGTGGCTCTGAAAGTGTGAC |
| 5109 | GGCAGTGGCTCTGAAAGTGTGACT |
| 5110 | GCAGTGGCTCTGAAAGTGTGACTA |
| 5111 | CAGTGGCTCTGAAAGTGTGACTAC |
| 5112 | AGTGGCTCTGAAAGTGTGACTACT |
| 5113 | GTGGCTCTGAAAGTGTGACTACTG |
| 5114 | TGGCTCTGAAAGTGTGACTACTGG |
| 5115 | GGCTCTGAAAGTGTGACTACTGGA |
| 5116 | GCTCTGAAAGTGTGACTACTGGAC |
| 5117 | CTCTGAAAGTGTGACTACTGGACC |
| 5118 | TCTGAAAGTGTGACTACTGGACCA |
| 5119 | CTGAAAGTGTGACTACTGGACCAG |
| 5120 | TGAAAGTGTGACTACTGGACCAGC |
| 5121 | GAAAGTGTGACTACTGGACCAGCA |
| 5122 | AAAGTGTGACTACTGGACCAGCAG |
| 5123 | AAGTGTGACTACTGGACCAGCAGC |
| 5124 | AGTGTGACTACTGGACCAGCAGCA |
| 5125 | GTGTGACTACTGGACCAGCAGCAG |
| 5126 | TGTGACTACTGGACCAGCAGCAGC |
| 5127 | GTGACTACTGGACCAGCAGCAGCC |
| 5128 | TGACTACTGGACCAGCAGCAGCCT |
| 5129 | GACTACTGGACCAGCAGCAGCCTC |
| 5130 | ACTACTGGACCAGCAGCAGCCTCC |
| 5131 | CTACTGGACCAGCAGCAGCCTCCT |
| 5132 | TACTGGACCAGCAGCAGCCTCCTC |
| 5133 | ACTGGACCAGCAGCAGCCTCCTCA |
| 5134 | CTGGACCAGCAGCAGCCTCCTCAT |
| 5135 | TGGACCAGCAGCAGCCTCCTCATT |
| 5136 | GGACCAGCAGCAGCCTCCTCATTA |
| 5137 | GACCAGCAGCAGCCTCCTCATTAC |
| 5138 | AGTGCCATGAGCTCACAGGGCAGTG |
| 5139 | GTGCCATGAGCTCACAGGGCAGTGG |
| 5140 | TGCCATGAGCTCACAGGGCAGTGGC |
| 5141 | GCCATGAGCTCACAGGGCAGTGGCT |
| 5142 | CCATGAGCTCACAGGGCAGTGGCTC |
| 5143 | CATGAGCTCACAGGGCAGTGGCTCT |
| 5144 | ATGAGCTCACAGGGCAGTGGCTCTG |
| 5145 | TGAGCTCACAGGGCAGTGGCTCTGA |
| 5146 | GAGCTCACAGGGCAGTGGCTCTGAA |
| 5147 | AGCTCACAGGGCAGTGGCTCTGAAA |
| 5148 | GCTCACAGGGCAGTGGCTCTGAAAG |
| 5149 | CTCACAGGGCAGTGGCTCTGAAAGT |
| 5150 | TCACAGGGCAGTGGCTCTGAAAGTG |
| 5151 | CACAGGGCAGTGGCTCTGAAAGTGT |
| 5152 | ACAGGGCAGTGGCTCTGAAAGTGTG |
| 5153 | CAGGGCAGTGGCTCTGAAAGTGTGA |
| 5154 | AGGGCAGTGGCTCTGAAAGTGTGAC |
| 5155 | GGGCAGTGGCTCTGAAAGTGTGACT |
| 5156 | GGCAGTGGCTCTGAAAGTGTGACTA |
| 5157 | GCAGTGGCTCTGAAAGTGTGACTAC |
| 5158 | CAGTGGCTCTGAAAGTGTGACTACT |
| 5159 | AGTGGCTCTGAAAGTGTGACTACTG |
| 5160 | GTGGCTCTGAAAGTGTGACTACTGG |
| 5161 | TGGCTCTGAAAGTGTGACTACTGGA |
| 5162 | GGCTCTGAAAGTGTGACTACTGGAC |
| 5163 | GCTCTGAAAGTGTGACTACTGGACC |
| 5164 | CTCTGAAAGTGTGACTACTGGACCA |
| 5165 | TCTGAAAGTGTGACTACTGGACCAG |
| 5166 | CTGAAAGTGTGACTACTGGACCAGC |
| 5167 | TGAAAGTGTGACTACTGGACCAGCA |
| 5168 | GAAAGTGTGACTACTGGACCAGCAG |
| 5169 | AAAGTGTGACTACTGGACCAGCAGC |
| 5170 | AAGTGTGACTACTGGACCAGCAGCA |
| 5171 | AGTGTGACTACTGGACCAGCAGCAG |
| 5172 | GTGTGACTACTGGACCAGCAGCAGC |
| 5173 | TGTGACTACTGGACCAGCAGCAGCC |
| 5174 | GTGACTACTGGACCAGCAGCAGCCT |
| 5175 | TGACTACTGGACCAGCAGCAGCCTC |
| 5176 | GACTACTGGACCAGCAGCAGCCTCC |
| 5177 | ACTACTGGACCAGCAGCAGCCTCCT |
| 5178 | CTACTGGACCAGCAGCAGCCTCCTC |
| 5179 | TACTGGACCAGCAGCAGCCTCCTCA |
| 5180 | ACTGGACCAGCAGCAGCCTCCTCAT |
| 5181 | CTGGACCAGCAGCAGCCTCCTCATT |
| 5182 | TGGACCAGCAGCAGCCTCCTCATTA |
| 5183 | GGACCAGCAGCAGCCTCCTCATTAC |
| 5184 | AGTGCCATGAGCTCACAGGGCAGTGG |
| 5185 | GTGCCATGAGCTCACAGGGCAGTGGC |
| 5186 | TGCCATGAGCTCACAGGGCAGTGGCT |
| 5187 | GCCATGAGCTCACAGGGCAGTGGCTC |
| 5188 | CCATGAGCTCACAGGGCAGTGGCTCT |
| 5189 | CATGAGCTCACAGGGCAGTGGCTCTG |
| 5190 | ATGAGCTCACAGGGCAGTGGCTCTGA |
| 5191 | TGAGCTCACAGGGCAGTGGCTCTGAA |
| 5192 | GAGCTCACAGGGCAGTGGCTCTGAAA |
| 5193 | AGCTCACAGGGCAGTGGCTCTGAAAG |
| 5194 | GCTCACAGGGCAGTGGCTCTGAAAGT |
| 5195 | CTCACAGGGCAGTGGCTCTGAAAGTG |
| 5196 | TCACAGGGCAGTGGCTCTGAAAGTGT |
| 5197 | CACAGGGCAGTGGCTCTGAAAGTGTG |
| 5198 | ACAGGGCAGTGGCTCTGAAAGTGTGA |
| 5199 | CAGGGCAGTGGCTCTGAAAGTGTGAC |
| 5200 | AGGGCAGTGGCTCTGAAAGTGTGACT |
| 5201 | GGGCAGTGGCTCTGAAAGTGTGACTA |
| 5202 | GGCAGTGGCTCTGAAAGTGTGACTAC |
| 5203 | GCAGTGGCTCTGAAAGTGTGACTACT |
| 5204 | CAGTGGCTCTGAAAGTGTGACTACTG |
| 5205 | AGTGGCTCTGAAAGTGTGACTACTGG |
| 5206 | GTGGCTCTGAAAGTGTGACTACTGGA |
| 5207 | TGGCTCTGAAAGTGTGACTACTGGAC |
| 5208 | GGCTCTGAAAGTGTGACTACTGGACC |
| 5209 | GCTCTGAAAGTGTGACTACTGGACCA |
| 5210 | CTCTGAAAGTGTGACTACTGGACCAG |
| 5211 | TCTGAAAGTGTGACTACTGGACCAGC |
| 5212 | CTGAAAGTGTGACTACTGGACCAGCA |
| 5213 | TGAAAGTGTGACTACTGGACCAGCAG |
| 5214 | GAAAGTGTGACTACTGGACCAGCAGC |
| 5215 | AAAGTGTGACTACTGGACCAGCAGCA |
| 5216 | AAGTGTGACTACTGGACCAGCAGCAG |
| 5217 | AGTGTGACTACTGGACCAGCAGCAGC |
| 5218 | GTGTGACTACTGGACCAGCAGCAGCC |
| 5219 | TGTGACTACTGGACCAGCAGCAGCCT |
| 5220 | GTGACTACTGGACCAGCAGCAGCCTC |
| 5221 | TGACTACTGGACCAGCAGCAGCCTCC |
| 5222 | GACTACTGGACCAGCAGCAGCCTCCT |
| 5223 | ACTACTGGACCAGCAGCAGCCTCCTC |
| 5224 | CTACTGGACCAGCAGCAGCCTCCTCA |
| 5225 | TACTGGACCAGCAGCAGCCTCCTCAT |
| 5226 | ACTGGACCAGCAGCAGCCTCCTCATT |
| 5227 | CTGGACCAGCAGCAGCCTCCTCATTA |
| 5228 | TGGACCAGCAGCAGCCTCCTCATTAC |

TABLE 11
Exemplary ASOs that target regRNA RR84_v1

| SEQ ID | |
|---|---|
| NO | Sequence |
| 5229 | GAATTTAACTGAAAAACTGC |
| 5230 | TGAGAATAGAATTTAACTGA |
| 5231 | GTGCTATAAATGAGAATAGA |
| 5232 | AAACTGTGCTATAAATGAGA |
| 5233 | ATACTAAAACTGTGCTATAA |
| 5234 | CAGGCATACTAAAACTGTGC |
| 5235 | TTATGGAATCAGGCATACTA |
| 5236 | GCACGTTATGGAATCAGGCA |
| 5237 | CATTAGATAGCACGTTATGG |
| 5238 | AGCCACATTAGATAGCACGT |
| 5239 | AGAGCAGCCACATTAGATAG |
| 5240 | TTATTAGAGCAGCCACATTA |
| 5241 | GAAATTATTATTAGAGCAGC |
| 5242 | GACTGAGAAATTATTATTAG |
| 5243 | CCCAAGGACTGAGAAATTAT |
| 5244 | ACACTCCCAAGGACTGAGAA |
| 5245 | GCTAAAAACACTCCCAAGGA |
| 5246 | CATCAGCTAAAAACACTCCC |
| 5247 | TCGGGTCACATCAGCTAAAA |
| 5248 | GGAATTTCGGGTCACATCAG |
| 5249 | GAATAGGAATTTCGGGTCAC |
| 5250 | TATAGGAATAGGAATTTCGG |
| 5251 | GACAACATATAGGAATAGGA |
| 5252 | GAGGCCTGGACAACATATAG |
| 5253 | GGAATTGAGGCCTGGACAAC |
| 5254 | GTTCCCCAGGAATTGAGGCC |
| 5255 | TCTCGGTTCCCCAGGAATTG |
| 5256 | AGTCACTGTCTCGGTTCCCC |
| 5257 | TATCCCAGTCACTGTCTCGG |
| 5258 | AGAGTTATCCCAGTCACTGT |
| 5259 | TTCCAAGAGTTATCCCAGTC |
| 5260 | TGACCCATTCCAAGAGTTAT |
| 5261 | GTGATCTGACCCATTCCAAG |
| 5262 | AGAGAGAGGTGATCTGACCC |
| 5263 | ACCTCTTTCAGAGAGAGGTG |
| 5264 | TCAGATAACCTCTTTCAGAG |
| 5265 | CTTATCTTTCAGATAACCTC |
| 5266 | TTCATCTTATCTTTCAGATA |
| 5267 | GTTCTCCATTTCATCTTATC |
| 5268 | CAACTGTGTTCTCCATTTCA |
| 5269 | CTGCAATCACAACTGTGTTC |
| 5270 | GGATTTCTGCAATCACAACT |
| 5271 | ACAAGAAGGATTTCTGCAAT |
| 5272 | AAGCACACAAGAAGGATTTC |
| 5273 | GCATTAACAAGCACACAAGA |
| 5274 | ACAAAGAGCATTAACAAGCA |
| 5275 | AACAGACAAAGAGCATTAAC |
| 5276 | AGGCACAACAGACAAAGAGC |
| 5277 | CCTGAAAAGGCACAACAGAC |
| 5278 | GCACTTCCCTGAAAAGGCAC |
| 5279 | AAGCTTGGGCACTTCCCTGA |
| 5280 | CTCCCAAGCTTGGGCACTTC |
| 5281 | TCCATGTCCTCCCAAGCTTG |
| 5282 | TGTTCTCCATGTCCTCCCAA |
| 5283 | GCCTATTGTTCTCCATGTCC |
| 5284 | CAATATGCCTATTGTTCTCC |
| 5285 | ACTCTCCAATATGCCTATTG |
| 5286 | CACTCACTCTCCAATATGCC |
| 5287 | AACCCCACTCACTCTCCAAT |
| 5288 | GACTCCAAACCCCACTCACT |
| 5289 | GGCTCTGACTCCAAACCCCA |
| 5290 | CTAAGGGGCTCTGACTCCAA |
| 5291 | CAAGTCTAAGGGGCTCTGAC |
| 5292 | GTAGGATTCAAGTCTAAGGG |
| 5293 | GCAGAGTAGGATTCAAGTCT |
| 5294 | ACAGCTGGCAGAGTAGGATT |
| 5295 | GACTGCACAGCTGGCAGAGT |
| 5296 | TGTCTGGGACTGCACAGCTG |
| 5297 | GGATTTGTCTGGGACTGCAC |
| 5298 | TAAGGGGATTTGTCTGGGAC |
| 5299 | CAGAAAGGTAAGGGGATTTG |
| 5300 | ACTAGGCTCAGAAAGGTAAG |
| 5301 | ATATAAGAAACTAGGCTCAG |
| 5302 | GTGAGCACTAACATCATTTT |
| 5303 | ATAAAGTGAGCACTAACATC |
| 5304 | CAATCTTATAAAGTGAGCAC |
| 5305 | TAGTCATTATCTCTAATCTT |
| 5306 | GGAGCTTAATAGTCATTATC |
| 5307 | CACTACTAGGAGCTTAATAG |
| 5308 | TCTAGGCACTACTAGGAGCT |
| 5309 | GTTTCTCTAGGCACTACTAG |
| 5310 | GCATTCACTGTTTCTCTAGG |
| 5311 | ATTGAGCATTCACTGTTTCT |
| 5312 | GTTTTATTAACAGCAATTAC |
| 5313 | GTTTTAATAGGTAAATATTG |
| 5314 | GATTAATGATGTTTTAATAG |
| 5315 | GAATAGGGATTAATGATGTT |
| 5316 | TCATCGAATAGGGATTAATG |
| 5317 | TGACATTTCATCGAATAGGG |
| 5318 | TCAAATGACATTTCATCGAA |
| 5319 | CCAGTGTCAAATGACATTTC |
| 5320 | ACTCCCCAGTGTCAAATGAC |
| 5321 | TAGATTACTCCCCAGTGTCA |
| 5322 | AGTTTGTTAGATTACTCCCC |
| 5323 | CATGTAGTTTGTTAGATTAC |
| 5324 | ATCTTCATGTAGTTTGTTAG |
| 5325 | TATCACTATCTTCATGTAGT |
| 5326 | ACATAATTATCACTATCTTC |
| 5327 | GTTAGCAACATAATTATCAC |
| 5328 | CTGAGTACAGTTAGCAACAT |
| 5329 | CTTTTCCTGAGTACAGTTAG |
| 5330 | GAGTCCCTTTTCCTGAGTAC |
| 5331 | AGCTTGAGTCCCTTTTCCTG |
| 5332 | ATGTGAAGCTTGAGTCCCTT |
| 5333 | CCAAAAATGTGAAGCTTGAG |
| 5334 | AACAGCCAAAAATGTGAAGC |
| 5335 | TTCATAAACAGCCAAAAATG |
| 5336 | TTGCCTTCATAAACAGCCAA |
| 5337 | AGACATTTGCCTTCATAAAC |
| 5338 | ATGGGAAGACATTTGCCTTC |
| 5339 | TCTCCATGGGAAGACATTTG |
| 5340 | GCATCTCTCCATGGGAAGAC |
| 5341 | CTTTTTGCATCTCTCCATGG |
| 5342 | TAAGAATGTCTTTTTGCATC |
| 5343 | GGTCTGGTAAGAATGTCTTT |
| 5344 | CCACCATTGGTCTGGTAAGA |
| 5345 | AGCAGCCACCATTGGTCTGG |
| 5346 | ATTGGAGCAGCCACCATTGG |
| 5347 | CTCATTGGGATTGGAGCAGC |
| 5348 | AGCCCTCTCATTGGGATTGG |
| 5349 | TCTGTCAGCCCTCTCATTGG |
| 5350 | TTATTTCTGTCAGCCCTCTC |
| 5351 | GGTTATTATTTCTGTCAGCC |
| 5352 | GACCTTGGTTATTATTTCTG |
| 5353 | AAACTGACCTTGGTTATTAT |
| 5354 | GTTGGAAACTGACCTTGGTT |
| 5355 | TTTTCAGGGGTTGGAAACTG |
| 5356 | GGGATTTTTCAGGGGTTGGA |
| 5357 | CTGTTGGGATTTTTCAGGGG |
| 5358 | GTTTCCTGTTGGGATTTTTC |
| 5359 | CATCTGTGGTTTCCTGTTGG |
| 5360 | TCGACCATCTGTGGTTTCCT |
| 5361 | ATGACCTCGACCATCTGTGG |
| 5362 | ATTCAGCGCATGACCTCGAC |
| 5363 | CCCTTTTCATTCAGCGCATG |
| 5364 | GACCAAATGGCCCTTTTCAT |
| 5365 | TAGCTGACCAAATGGCCCTT |
| 5366 | TGCCATAGCTGACCAAATGG |
| 5367 | CAATGATGCCATAGCTGACC |
| 5368 | AAAATCAATGATGCCATAGC |
| 5369 | ATTAATAAAATCAATGATGC |
| 5370 | GGTTTCTAGTGATATTAATA |
| 5371 | ATCTTTCTGGTTTCTAGTGA |
| 5372 | GTGACCAAAATCTTTCTGGT |
| 5373 | AGTTTTAGTGACCAAAATCT |
| 5374 | CAAATTCAGTTTTAGTGACC |
| 5375 | TTGAATGATCAAATTCAGTT |
| 5376 | GATATTTGAATGATCAAATT |
| 5377 | TCAGCAAGATATTTGAATGA |
| 5378 | GAGACTTTCAGCAAGATATT |
| 5379 | GAAAGACTGAGACTTTCAGC |
| 5380 | TGTTTAAAAGGGAAAGACTG |
| 5381 | GATGGGAATGTTTAAAAGGG |
| 5382 | ATAGAGAGATGGGAATGTTT |
| 5383 | TAGGGATAGAGAGATGGGAA |
| 5384 | GGTGATAGGGATAGAGAGAT |
| 5385 | TCCAAGGGTGATAGGGATAG |
| 5386 | TGCTATCCAAGGGTGATAGG |
| 5387 | GTTAATGCTATCCAAGGGTG |
| 5388 | AGGCTGTTAATGCTATCCAA |
| 5389 | ATCTGAGAGGCTGTTAATGC |
| 5390 | CCAAGATCTGAGAGGCTGTT |
| 5391 | ATTTTCCAAGATCTGAGAGG |
| 5392 | AGCAAATTTTCCAAGATCTG |
| 5393 | GGTGCAGCAAATTTTCCAAG |
| 5394 | CCCAAGGTGCAGCAAATTTT |
| 5395 | ATAACATCCCAAGGTGCAGC |
| 5396 | GCTTGATAACATCCCAAGGT |
| 5397 | AAGAGGCTTGATAACATCCC |
| 5398 | CAGGAAAGAGGCTTGATAAC |
| 5399 | ATTGGCTATCAGGAAAGAGG |
| 5400 | AAATTGATTGGCTATCAGGA |
| 5401 | AGAACAAAATTGATTGGCTA |
| 5402 | CTAGATTAAGAACAAAATTG |
| 5403 | GCTGGGAAACCTAGATTAAG |
| 5404 | GAGTACCAGCTGGGAAACCT |
| 5405 | ATCAACACTGAGTACCAGCT |
| 5406 | AAGCCTTTATCAACACTGAG |
| 5407 | GGTTTCCAAAAGCCTTTATC |
| 5408 | ATAAGATGGTTTCCAAAAGC |
| 5409 | GACAAATAAGATGGTTTCCA |
| 5410 | ATATTAGCTATGTAAAAGAA |
| 5411 | GAGCAAGGATATTAGCTATG |
| 5412 | CAAGACAGAGCAAGGATATT |
| 5413 | AAAGCTTTGCAAGACAGAGC |
| 5414 | GGCATGAAGAAAGAAAAGCT |
| 5415 | TTCAGCAGGCATGAAGAAAG |
| 5416 | GAAAGGATTCAGCAGGCATG |
| 5417 | CTTGAGGCTGAAAGGATTCA |
| 5418 | TAGAACCTTGAGGCTGAAAG |
| 5419 | GTGACTAGAACCTTGAGGCT |
| 5420 | GGTATGTGACTAGAACCTTG |
| 5421 | ACGAGAAGGTATGTGACTAG |
| 5422 | GATTGATGCACGAGAAGGTA |
| 5423 | TACAAGATTGATGCACGAGA |
| 5424 | GGATTATACAAGATTGATGC |
| 5425 | CTTGGGGGATTATACAAGAT |
| 5426 | TTCTTCTTGGGGGATTATAC |
| 5427 | GTTACTTCTTCTTGGGGGAT |
| 5428 | AAGGTGTTACTTCTTCTTGG |
| 5429 | AGGGAGAAAGGTGTTACTTC |
| 5430 | AAACACAGGGAGAAAGGTGT |
| 5431 | GTTACGGAAACACAGGGAGA |
| 5432 | ATTACAGTGTTACGGAAACA |
| 5433 | GATTAATTACAGTGTTACGG |
| 5434 | TGCACAAGGATTAATTACAG |
| 5435 | ACAAATGCACAAGGATTAAT |
| 5436 | CACATACAAATGCACAAGGA |
| 5437 | AATTCCACACACATACAAAT |
| 5438 | TGCAATAATTCCACACACAT |
| 5439 | GCAGAATGCAATAATTCCAC |
| 5440 | CTATATGCAGAATGCAATAA |
| 5441 | ATACTGCCTATATGCAGAAT |
| 5442 | ACTCTATACTGCCTATATGC |
| 5443 | TGCACTCTTCACCACTACTC |
| 5444 | TTCCTAGTCTGGCTCCAGAA |
| 5445 | TATTCAAATTCCTAGTCTGG |
| 5446 | GTCTGTATTCAAATTCCTAG |
| 5447 | CAAGAGTCTGTATTCAAATT |
| 5448 | GCCCAACAAGAGTCTGTATT |
| 5449 | GTAACTTGCCCAACAAGAGT |
| 5450 | AGACAAGAAAATTGAGCCAC |
| 5451 | GTTCTATTATTGTTCTTATT |
| 5452 | GGGGTAGGTTCTATTATTGT |
| 5453 | CCATTGGGGTAGGTTCTATT |
| 5454 | ATTACCCATTGGGGTAGGTT |
| 5455 | CCTCATTATTACCCATTGGG |
| 5456 | CGCTACTTTAATCCTCATTA |
| 5457 | TATATTCGCTACTTTAATCC |
| 5458 | TTTACATATATTCGCTACTT |
| 5459 | TAGGCTTTACATATATTCGC |
| 5460 | CGCTGTCCTATAGGCTTTAC |
| 5461 | ATGATAGGCGCTGTCCTATA |
| 5462 | ATTATATGATAGGCGCTGTC |
| 5463 | TGTTTATTATATGATAGGCG |
| 5464 | CATATTGTTTATTATATGAT |
| 5465 | TCAGAACTAACACATATTGT |
| 5466 | GCAAATAATCAGAACTAACA |
| 5467 | TGCAAGCAAATAATCAGAAC |
| 5468 | AGAAATGCAAGCAAATAATC |
| 5469 | GGGAAATAAGAAATGCAAGC |
| 5470 | CGTAGGGGAAATAAGAAATG |
| 5471 | AGCCTCGTAGGGGAAATAAG |
| 5472 | CTTACAGCCTCGTAGGGGAA |
| 5473 | GAGGAACTTACAGCCTCGTA |
| 5474 | GCTCTTGAGGAACTTACAGC |
| 5475 | CTTGTGCTCTTGAGGAACTT |
| 5476 | TTGCACTTGTGCTCTTGAGG |
| 5477 | ATTGCCTTGCACTTGTGCTC |
| 5478 | GGAGCAATTGCCTTGCACTT |
| 5479 | ATTCTGGAGCAATTGCCTTG |
| 5480 | TAAATATTCTGGAGCAATTG |
| 5481 | TTCAATAAATATTCTGGAGC |
| 5482 | AGGAATATGAATTTAATATA |
| 5483 | GGAAATGTTCTCAGGAATAT |
| 5484 | GATTAAGGAAATGTTCTCAG |
| 5485 | CTGGACAAGAGATTAAGGAA |
| 5486 | TCCAACTGGACAAGAGATTA |
| 5487 | TTCACTCCAACTGGACAAGA |
| 5488 | GCTCTCTTCACTCCAACTGG |
| 5489 | GTTCCAAGCTCTCTTCACTC |
| 5490 | GTTTAGTTCCAAGCTCTCTT |
| 5491 | CTTGCTGTTTAGTTCCAAGC |
| 5492 | GGTTCTTTCTTGCTGTTTAG |
| 5493 | TGTCTTAGGTTCTTTCTTGC |
| 5494 | GGGTGATGTCTTAGGTTCTT |
| 5495 | TACCTGGGTGATGTCTTAGG |
| 5496 | ACAATGGCCTAATACCTGGG |
| 5497 | GGAACACAATGGCCTAATAC |
| 5498 | CTGCTGGAACACAATGGCCT |
| 5499 | TAACCCTGCTGGAACACAAT |
| 5500 | TTATCTAACCCTGCTGGAAC |
| 5501 | TGAGCAGTTATCTAACCCTG |
| 5502 | GACCTTGAGCAGTTATCTAA |
| 5503 | TTACTGTGACCTTGAGCAGT |
| 5504 | GCTCCTTACTGTGACCTTGA |
| 5505 | TACTCTGCTCCTTACTGTGA |
| 5506 | GCACTTACTCTGCTCCTTAC |
| 5507 | TTCCGGCACTTACTCTGCTC |
| 5508 | CCTGACTTCCGGCACTTACT |
| 5509 | GGACCCCTGACTTCCGGCAC |
| 5510 | TGAAATTCAGGACCCCTGAC |
| 5511 | GCACACTGAAATTCAGGACC |
| 5512 | GATAAAGCACACTGAAATTC |
| 5513 | GTGTAGATAAAGCACACTGA |
| 5514 | CTACAGTGTAGATAAAGCAC |
| 5515 | GTCACTCTACAGTGTAGATA |
| 5516 | AAGACAGTCACTCTACAGTG |
| 5517 | CCCCTGAAAGACAGTCACTC |
| 5518 | GAGGTCCCCTGAAAGACAGT |
| 5519 | TGAATTTTGAGGTCCCCTGA |

[0094] In some embodiments, an ASO provided herein comprises 16, 17, 18, 19, 20, 21, 22, 23, 24, 26, or 26 of the nucleotide sequence of an ASO provided in Table 2, 3, 4, 5, 6, 7, 8, 9, 10, or 11. For example, an ASO can comprise the first (from 5′ to 3′) 16, 17, 18, 19, 20, 21, 22, 23, 24, 25, or 26 nucleotides of any one of SEQ ID NOs: 14-644 or 645-6021, e.g., nucleotides at positions 1 to any one of positions 16, 17, 18, 19, 21, 22, 23, 24, 25, or 26 of any one of SEQ ID NOs: 14-6021. Alternatively, an ASO can comprise the last 16, 17, 18, 19, 20, 21, 22, 23, 24, or 25, nucleotides of any one of SEQ ID NOs: 14-6021, e.g., nucleotides at positions 2, 3, 4, 5, 6, 7, 8, 9, or 10 to positions 16, 17, 18, 19, 20, 21, 22, 23, 24, 25, or 26 of any one of SEQ ID NOs: 14-644 or 645-6021. For example, an ASO provided herein comprises the nucleotide sequence of nucleotides at positions 1 to 16, 1 to 17, 1 to 18, 1 to 19, 1 to 20, 1 to 21, 1 to 22, 1 to 23, 1 to 24, 1 to 25, 1 to 26, 2 to 17, 2 to 18, 2 to 19, 2 to 20, 2 to 21, 2 to 22, 2 to 23, 2 to 24, 2 to 25, 2 to 26, 3 to 18, 3 to 19, 3 to 20, 3 to 21, 3 to 22, 3 to 23, 3 to 24, 3 to 25, 3 to 26, 4 to 19, 4 to 20, 4 to 21, 4 to 22, 4 to 23, 4 to 24, 4 to 25, 4 to 26, 5 to 20, 5 to 21, 5 to 22, 5 to 23, 5 to 24, 5 to 25, 5 to 26, 6 to 21, 6 to 22, 6 to 23, 6 to 24, 6 to 25, 6 to 26, 7 to 22, 7 to 23, 7 to 24, 7 to 25, 7 to 26, 8 to 23, 8 to 24, 8 to 25, 8 to 26, 9 to 24, 9 to 25, 9 to 26, 10 to 25, or 10 to 26 of any one of SEQ ID NOs: 14-644 or 645-6021. In some embodiments, an ASO provided herein comprises the nucleotide sequence of nucleotides at positions 1 to 16, 2 to 17, 3 to 18, 4 to 19, 5 to 20, 6 to 21, 7 to 23, 8 to 24, 9 to 25, or 10-26 of any one of SEQ ID NOs: 14-644 or 645-6021. In such embodiments, the ASO is at least 16, 17, 18, 19, or 20 nucleotides in length.

[0095] In some aspects, an ASO provided herein can comprise the nucleotide sequence of any one of SEQ ID NOs: 14-6021 plus up to four additional nucleotides at the 5′ end of said nucleotide sequence that are complementary to the target ABCB11 regRNA. For example, the ASO can comprise one, two, three, or four additional nucleotides at the 5′ end of any one of SEQ ID NOs: 14-6021 that are complementary to the target ABCB11 regRNA (e.g., any one of the regRNAs described in Table 1, including RR62 v2 (SEQ ID NO: 1), RR63 v1 (SEQ ID NO: 2), RR63 v2 (SEQ ID NO: 3), RR64 v2 (SEQ ID NO: 4) or RR74 v1 (SEQ ID NO: 5), RR54 v2 (SEQ ID NO: 6), RR62 v1 (SEQ ID NO: 7), RR64 v1 (SEQ ID NO: 8), RR65 v1 (SEQ ID NO: 9), RR84 v1 (SEQ ID NO: 10), RR54 v1 (SEQ ID NO: 11), RR75 v1 (SEQ ID NO: 12), and RR76 v1 (SEQ ID NO: 13)). In some embodiments, if the ASO includes up to four (e.g., 1, 2, 3, or 4) additional nucleotides at the 5′ end of the nucleotide sequence any one of SEQ ID NOs: 14-6021 that are complementary to the target ABCB11 regRNA, the ASO also can exclude up to four (e.g., 1, 2, 3 or 4) nucleotides from the 3′ end of the nucleotide sequence of any one of SEQ ID NOs: 14-6021. For example, the ASO can exclude one, two, three, or four 3′ end nucleotides from the nucleotide sequence of any one of SEQ ID NOs: 14-6021 if it includes one, two, three or four 5′ nucleotides that are complementary to the target ABCB11 regRNA.

[0096] In some aspects, an ASO provided herein can comprise the nucleotide sequence of any one of SEQ ID NOs: 14-6021, plus up to four additional nucleotides at the 3′ end of said nucleotide sequence that are complementary to the target ABCB11 regRNA. For example, the ASO can comprise one, two, three, or four additional nucleotides at the 3′ end of any one of SEQ ID NOs: 14-6021 that are complementary to the target ABCB11 regRNA (e.g., any one of the regRNAs described in Table 1, including RR62 v2 (SEQ ID NO: 1), RR63 v1 (SEQ ID NO: 2), RR63 v2 (SEQ ID NO: 3), RR64 v2 (SEQ ID NO: 4) or RR74 v1 (SEQ ID NO: 5), RR54 v2 (SEQ ID NO: 6), RR62 v1 (SEQ ID NO: 7), RR64 v1 (SEQ ID NO: 8), RR65 v1 (SEQ ID NO: 9), RR84 v1 (SEQ ID NO: 10), RR54 v1 (SEQ ID NO: 11), RR75 v1 (SEQ ID NO: 12), and RR76 v1 (SEQ ID NO: 13)). In some embodiments, if the ASO includes up to four (e.g., 1, 2, 3, or 4) additional nucleotides at the 3′ end of the nucleotide sequence of any one of SEQ ID NOs: 14-6021 that are complementary to the target ABCB11 regRNA, the ASO also can exclude up to four (e.g., 1, 2, 3, or 4) nucleotides from the 5′ end of the nucleotide sequence any one of SEQ ID NOs: 14-6021. For example, the ASO can exclude one, two, three, or four 5′ end nucleotides from the nucleotide sequence of any one of SEQ ID NOs: 14-6021 if it includes one, two, three or four 3′ nucleotides that are complementary to the target ABCB11 regRNA.

[0097] In some embodiments, the regulatory RNA has a nucleotide sequence of SEQ ID NO: 1, and the ASO comprises a nucleotide sequence selected from the group consisting of SEQ ID NOs: 104-138, 217-272, 516-528, 645-1517, 5610-5644, 5723-5778, and 6018-6021.

[0098] In some embodiments, the regulatory RNA has a nucleotide sequence of SEQ ID NO: 2, and the ASO comprises a nucleotide sequence selected from the group consisting of SEQ ID NOs: 14-103, 273-381, 390-407, 463, 467-478, 515, 644, 1518-2057, 5520-5609, 5779-5887, 5896-5913, 5969, 5971-5980, and 6017.

[0099] In some embodiments, the regulatory RNA has a nucleotide sequence of SEQ ID NO: 3, and the ASO comprises a nucleotide sequence selected from the group consisting of SEQ ID NOs: 14-103, 139-148, 273-407, 463, 467-478, 515, 530-623, 625-644, 1518-2308, 5520-5609, 5645-5654, 5779-5913, 5969, 5971-5980, and 6017.

[0100] In some embodiments, the regulatory RNA has a nucleotide sequence of SEQ ID NO: 4, and the ASO comprises a nucleotide sequence selected from the group consisting of SEQ ID NOs: 149-168, 408-462, 464, 479-514, 2309-3956, 5655-5674, 5914-5968, 5970, and 5981-6016.

[0101] In some embodiments, the regulatory RNA has a nucleotide sequence of SEQ ID NO: 5, and the ASO comprises a nucleotide sequence selected from the group consisting of SEQ ID NOs: 169-216, 4062-5228, and 5675-5722.

[0102] In some embodiments, the regulatory RNA has a nucleotide sequence of SEQ ID NO: 7, and the ASO comprises a nucleotide sequence selected from the group consisting of SEQ ID NOs: 645-954.

[0103] In some embodiments, the regulatory RNA has a nucleotide sequence of SEQ ID NO: 8, and the ASO comprises a nucleotide sequence selected from the group consisting of SEQ ID NOs: 2309-2806.

[0104] In some embodiments, the regulatory RNA has a nucleotide sequence of SEQ ID NO: 9, and the ASO comprises a nucleotide sequence selected from the group consisting of SEQ ID NOs: 3957-4061.

[0105] In some embodiments, the regulatory RNA has a nucleotide sequence of SEQ ID NO: 10, and the ASO comprises a nucleotide sequence selected from the group consisting of SEQ ID NOs: 5229-5519.

### Hybridization and ΔG

[0106] The term “hybridizing” or “hybridizes” as used herein is to be understood as two nucleic acid strands (e.g. an oligonucleotide and a target nucleic acid) forming hydrogen bonds between base pairs on opposite strands thereby forming a duplex. The affinity of the binding between two nucleic acid strands is the strength of the hybridization. It is often described in terms of the melting temperature (Tm) defined as the temperature at which half of the oligonucleotides are duplexed with the target nucleic acid. At physiological conditions Tm, is not strictly proportional to the affinity (Mergny and Lacroix, 2003, Oligonucleotides 13:515-537). The standard state Gibbs free energy ΔG° is a more accurate representation of binding affinity and is related to the dissociation constant (K_{d}) of the reaction by ΔG°=−RTIn (K_{d}), where R is the gas constant and T is the absolute temperature. Therefore, a very low ΔG° of the reaction between an oligonucleotide and the target nucleic acid reflects a strong hybridization between the oligonucleotide and target nucleic acid. ΔG° is the free energy associated with a reaction where aqueous concentrations are 1M, the pH is 7, and the temperature is 37° C. The hybridization of oligonucleotides to a target nucleic acid is a spontaneous reaction and for spontaneous reactions ΔG° is less than zero. ΔG° can be measured experimentally, for example, by use of the isothermal titration calorimetry (ITC) method as described in Hansen et al., 1965, Chem, Comm. 36-38 and Holdgate et al., 2005, Drug Discov Today. The skilled person will know that commercial equipment is available for ΔG° measurements. ΔG° can also be estimated numerically by using the nearest neighbor model as described by SantaLucia, 1998, Proc Natl Aced Sci USA. 95:1460-1465 using appropriately derived thermodynamic parameters described by Sugimoto et al., 1995, Biochemistry 34:11211-11216 and McTigue et al., 2004, Biochemistry 43:5388-5405. To have the possibility of modulating its intended nucleic acid target by hybridization, oligonucleotides of the present disclosure hybridize to a target nucleic acid with estimated ΔG° values below −10 kcal/mol for oligonucleotides that are 10-30 nucleotides in length. In some embodiments the degree or strength of hybridization is measured by the standard state Gibbs free energy ΔG°. The oligonucleotides may hybridize to a target nucleic acid with estimated ΔG° values below the range of −10 kcal/mol, such as below −15 kcal/mol, such as below −20 kcal/mol and such as below −25 kcal/mol for oligonucleotides that are 8-30 nucleotides in length. In some embodiments the oligonucleotides hybridize to a target nucleic acid with an estimated ΔG° value of −10 to −60 kcal/mol, such as −12 to −40 kcal/mol, −15 to −30 kcal/mol, −16 to −27 kcal/mol, or −18 to −25 kcal/mol.

### Duplex Region

[0107] The phrase “duplex region” refers to the region in two complementary or substantially complementary polynucleotides that form base pairs with one another, either by Watson-Crick base pairing or any other manner that allows for a stabilized duplex between polynucleotide strands that are complementary or substantially complementary. For example, a polynucleotide strand having 21 nucleotide units can base pair with another polynucleotide of 21 nucleotide units, yet only 19 bases on each strand are complementary or substantially complementary, such that the “duplex region” has 19 base pairs. The remaining bases may, for example, exist as 5′ and 3′ overhangs. Further, within the duplex region, 100% complementarity is not required; substantial complementarity is allowable within a duplex region. Substantial complementarity refers to 70% or greater complementarity. For example, a mismatch in a duplex region consisting of 19 base pairs results in 94.7% complementarity, rendering the duplex region substantially complementary. Duplex regions can be formed by two separate oligonucleotide strands, as well as by single oligonucleotide strands that can form hairpin structures comprising a duplex region.

[0108] A dsRNA includes two RNA strands that are complementary and hybridize to form a duplex structure under conditions in which the dsRNA will be used. One strand of a dsRNA (the antisense strand) includes a region of complementarity that is substantially complementary, and generally fully complementary, to a target sequence. The target sequence can be derived from the sequence of an ABCB11 regRNA, such as an eRNA or paRNA. The other strand (the sense strand) includes a region that is complementary to the antisense strand, such that the two strands hybridize and form a duplex structure when combined under suitable conditions. As described elsewhere herein and as known in the art, the complementary sequences of a dsRNA can also be contained as self-complementary regions of a single nucleic acid molecule, as opposed to being on separate oligonucleotides. Generally, the duplex structure is between 5 and 50 base pairs in length, e.g., between, 5-50, 5-49, 5-48, 5-47, 5-46, 5-45, 5-44, 5-43, 5-42, 5-41, 5-40, 5-39, 5-38, 5-37, 5-36, 5-35, 5-34, 5-33, 5-32, 5-31, 5-30, 5-29, 5-28, 5-27, 5-26, 5-25, 5-24, 5-23, 5-22, 5-21, 5-20, 5-19, 5-18, 5-17, 5-16, 5-15, 5-14, 5-13, 5-12, 5-11, 5-10, 5-9, 5-8, 5-7, 5-6, 6-50, 6-49, 6-48, 6-47, 6-46, 6-45, 6-44, 6-43, 6-42, 6-41, 6-40, 6-39, 6-38, 6-37, 6-36, 6-35, 6-34, 6-33, 6-32, 6-31, 6-30, 6-29, 6-28, 6-27, 6-26, 6-25, 6-24, 6-23, 6-22, 6-21, 6-20, 6-19, 6-18, 6-17, 6-16, 6-15, 6-14, 6-13, 6-12, 6-11, 6-10, 6-9, 6-8, 6-7, 8-50, 8-49, 8-48, 8-47, 8-46, 8-45, 8-44, 8-43, 8-42, 8-41, 8-40, 8-39, 8-38, 8-37, 8-36, 8-35, 8-34, 8-33, 8-32, 8-31, 8-30, 8-29, 8-28, 8-27, 8-26, 8-25, 8-24, 8-23, 8-22, 8-21, 8-20, 8-19, 8-18, 8-17, 8-16, 8-15, 8-14, 8-13, 8-12, 8-11, 8-10, 8-9, 10-50, 10-49, 10-48, 10-47, 10-46, 10-45, 10-44, 10-43, 10-42, 10-41, 10-40, 10-39, 10-38, 10-37, 10-36, 10-35, 10-34, 10-33, 10-32, 10-31, 10-30, 10-29, 10-28, 10-27, 10-26, 10-25, 10-24, 10-23, 10-22, 10-21, 10-20, 10-19, 10-18, 10-17, 10-16, 10-15, 10-14, 10-13, 10-12, 10-11, 10-10, 10-9, 12-50, 12-49, 12-48, 12-47, 12-46, 12-45, 12-44, 12-43, 12-42, 12-41, 12-40, 12-39, 12-38, 12-37, 12-36, 12-35, 12-34, 12-33, 12-32, 12-31, 12-30, 12-29, 12-28, 12-27, 12-26, 12-25, 12-24, 12-23, 12-22, 12-21, 12-20, 12-19, 12-18, 12-17, 12-16, 12-15, 12-14, 12-13, 15-50, 15-49, 15-48, 15-47, 15-46, 15-45, 15-44, 15-43, 15-42, 15-41, 15-40, 15-39, 15-38, 15-37, 15-36, 15-35, 15-34, 15-33, 15-32, 15-31, 15-30, 15-29, 15-28, 15-27, 15-26, 15-25, 15-24, 15-23, 15-22, 15-21, 15-20, 15-19, 15-18, 15-17, 18-50, 18-49, 18-48, 18-47, 18-46, 18-45, 18-44, 18-43, 18-42, 18-41, 18-40, 18-39, 18-38, 18-37, 18-36, 18-35, 18-34, 18-33, 18-32, 18-31, 18-30, 18-30, 18-29, 18-28, 18-27, 18-26, 18-25, 18-24, 18-23, 18-22, 18-21, 18-20, 19-50, 19-49, 19-48, 19-47, 19-46, 19-45, 19-44, 19-43, 19-42, 19-41, 19-40, 19-39, 19-38, 19-37, 19-36, 19-35, 19-34, 19-33, 19-32, 19-31, 19-30, 19-30, 19-29, 19-28, 19-27, 19-26, 19-25, 19-24, 19-23, 19-22, 19-21, 19-20, 20-50, 20-49, 20-48, 20-47, 20-46, 20-45, 20-44, 20-43, 20-42, 20-41, 20-40, 20-39, 20-38, 20-37, 20-36, 20-35, 20-34, 20-33, 20-32, 20-31, 20-30, 20-30, 20-29, 20-28, 20-27, 20-26, 20-25, 20-24, 20-23, 20-22, 20-21, 21-50, 21-49, 21-48, 21-47, 21-46, 21-45, 21-44, 21-43, 21-42, 21-41, 21-40, 21-39, 21-38, 21-37, 21-36, 21-35, 21-34, 21-33, 21-32, 21-31, 21-30, 21-29, 21-28, 21-27, 21-26, 21-25, 21-24, 21-23, 21-22, 22-50, 22-49, 22-48, 22-47, 22-46, 22-45, 22-44, 22-43, 22-42, 22-41, 22-40, 22-39, 22-38, 22-37, 22-36, 22-35, 22-34, 22-33, 22-32, 22-31, 22-30, 22-29, 22-28, 22-27, 22-26, 22-25, 22-24, 22-23, 23-50, 23-49, 23-48, 23-47, 23-46, 23-45, 23-44, 23-43, 23-42, 23-41, 23-40, 23-39, 23-38, 23-37, 23-36, 23-35, 23-34, 23-33, 23-32, 23-31, 23-30, 23-29, 23-28, 23-27, 23-26, 23-25, or 23-24 base pairs in length. Ranges and lengths intermediate to the above recited ranges and lengths are also contemplated to be part of the disclosure.

[0109] Similarly, the region of complementarity to the target sequence can be between 5 and 50 nucleotides in length, e.g., between 5-50, 5-49, 5-48, 5-47, 5-46, 5-45, 5-44, 5-43, 5-42, 5-41, 5-40, 5-39, 5-38, 5-37, 5-36, 5-35, 5-34, 5-33, 5-32, 5-31, 5-30, 5-29, 5-28, 5-27, 5-26, 5-25, 5-24, 5-23, 5-22, 5-21, 5-20, 5-19, 5-18, 5-17, 5-16, 5-15, 5-14, 5-13, 5-12, 5-11, 5-10, 5-9, 5-8, 5-7, 5-6, 6-50, 6-49, 6-48, 6-47, 6-46, 6-45, 6-44, 6-43, 6-42, 6-41, 6-40, 6-39, 6-38, 6-37, 6-36, 6-35, 6-34, 6-33, 6-32, 6-31, 6-30, 6-29, 6-28, 6-27, 6-26, 6-25, 6-24, 6-23, 6-22, 6-21, 6-20, 6-19, 6-18, 6-17, 6-16, 6-15, 6-14, 6-13, 6-12, 6-11, 6-10, 6-9, 6-8, 6-7, 8-50, 8-49, 8-48, 8-47, 8-46, 8-45, 8-44, 8-43, 8-42, 8-41, 8-40, 8-39, 8-38, 8-37, 8-36, 8-35, 8-34, 8-33, 8-32, 8-31, 8-30, 8-29, 8-28, 8-27, 8-26, 8-25, 8-24, 8-23, 8-22, 8-21, 8-20, 8-19, 8-18, 8-17, 8-16, 8-15, 8-14, 8-13, 8-12, 8-11, 8-10, 8-9, 10-50, 10-49, 10-48, 10-47, 10-46, 10-45, 10-44, 10-43, 10-42, 10-41, 10-40, 10-39, 10-38, 10-37, 10-36, 10-35, 10-34, 10-33, 10-32, 10-31, 10-30, 10-29, 10-28, 10-27, 10-26, 10-25, 10-24, 10-23, 10-22, 10-21, 10-20, 10-19, 10-18, 10-17, 10-16, 10-15, 10-14, 10-13, 10-12, 10-11, 10-10, 10-9, 12-50, 12-49, 12-48, 12-47, 12-46, 12-45, 12-44, 12-43, 12-42, 12-41, 12-40, 12-39, 12-38, 12-37, 12-36, 12-35, 12-34, 12-33, 12-32, 12-31, 12-30, 12-29, 12-28, 12-27, 12-26, 12-25, 12-24, 12-23, 12-22, 12-21, 12-20, 12-19, 12-18, 12-17, 12-16, 12-15, 12-14, 12-13, 15-50, 15-49, 15-48, 15-47, 15-46, 15-45, 15-44, 15-43, 15-42, 15-41, 15-40, 15-39, 15-38, 15-37, 15-36, 15-35, 15-34, 15-33, 15-32, 15-31, 15-30, 15-29, 15-28, 15-27, 15-26, 15-25, 15-24, 15-23, 15-22, 15-21, 15-20, 15-19, 15-18, 15-17, 18-50, 18-49, 18-48, 18-47, 18-46, 18-45, 18-44, 18-43, 18-42, 18-41, 18-40, 18-39, 18-38, 18-37, 18-36, 18-35, 18-34, 18-33, 18-32, 18-31, 18-30, 18-30, 18-29, 18-28, 18-27, 18-26, 18-25, 18-24, 18-23, 18-22, 18-21, 18-20, 19-50, 19-49, 19-48, 19-47, 19-46, 19-45, 19-44, 19-43, 19-42, 19-41, 19-40, 19-39, 19-38, 19-37, 19-36, 19-35, 19-34, 19-33, 19-32, 19-31, 19-30, 19-30, 19-29, 19-28, 19-27, 19-26, 19-25, 19-24, 19-23, 19-22, 19-21, 19-20, 20-50, 20-49, 20-48, 20-47, 20-46, 20-45, 20-44, 20-43, 20-42, 20-41, 20-40, 20-39, 20-38, 20-37, 20-36, 20-35, 20-34, 20-33, 20-32, 20-31, 20-30, 20-30, 20-29, 20-28, 20-27, 20-26, 20-25, 20-24, 20-23, 20-22, 20-21, 21-50, 21-49, 21-48, 21-47, 21-46, 21-45, 21-44, 21-43, 21-42, 21-41, 21-40, 21-39, 21-38, 21-37, 21-36, 21-35, 21-34, 21-33, 21-32, 21-31, 21-30, 21-29, 21-28, 21-27, 21-26, 21-25, 21-24, 21-23, 21-22, 22-50, 22-49, 22-48, 22-47, 22-46, 22-45, 22-44, 22-43, 22-42, 22-41, 22-40, 22-39, 22-38, 22-37, 22-36, 22-35, 22-34, 22-33, 22-32, 22-31, 22-30, 22-29, 22-28, 22-27, 22-26, 22-25, 22-24, 22-23, 23-50, 23-49, 23-48, 23-47, 23-46, 23-45, 23-44, 23-43, 23-42, 23-41, 23-40, 23-39, 23-38, 23-37, 23-36, 23-35, 23-34, 23-33, 23-32, 23-31, 23-30, 23-29, 23-28, 23-27, 23-26, 23-25, or 23-24 nucleotides in length. Ranges and lengths intermediate to the above recited ranges and lengths are also contemplated to be part of the disclosure.

### Chemical Modifications of ASOs

[0110] In certain embodiments, the ASO does not consist of only DNA. In certain embodiments, the ASO comprises at least one chemical modification relative to a natural nucleotide (e.g., ribonucleotide, e.g., 2′-deoxy-2′-ribonucleotide). Various chemical modifications can be included in the ASOs of the present disclosure. The modifications can include one or more modifications in a sugar group (e.g., ribose), one or more modifications in a phosphate group, one or more modifications in a nucleobase, one or more terminal modifications, or a combination thereof. In some embodiments, an exemplary ASO sequence targeting a regRNA as shown in Table 2 is chemically modified. Such modifications can be, but are not limited to, 2′-O-(2-methoxyethyl) (2′-MOE), locked nucleic acid (LNA), 5-methyl on the cytidine, constrained ethyl (CET), phosphorothioate (PS) linkage, and/or a phosphodiester (PO) linkage, or any combination thereof. Chemical modifications of RNA are known in the art and described in, for example, PCT Application Publication No. WO2013/177248, incorporated herein by reference. In certain embodiments, each cytidine in an ASO provided herein is modified by 5-methyl.

[0111] Various chemical modifications for use with ASOs of the present disclosure include, but are not limited to: 3′-terminal deoxy-thymine (dT) nucleotides, 2′-O-methyl modified nucleotides, 2′-fluoro modified nucleotides, 2′-deoxy-modified nucleotides, locked nucleotides, unlocked nucleotides, conformationally restricted nucleotides, constrained ethyl nucleotides, abasic nucleotides, 2′-amino-modified nucleotides, 2′-O-allyl-modified nucleotides, 2′-C-alkyl-modified nucleotides, 2′-hydroxyl-modified nucleotides, 2′-methoxyethyl modified nucleotides, 2′-O-alkyl-modified nucleotides, morpholino nucleotides, phosphoramidates, non-natural base comprising nucleotides, tetrahydropyran modified nucleotides, 1,5-anhydrohexitol modified nucleotides, cyclohexenyl modified nucleotides, nucleotides comprising a phosphorothioate group, nucleotides comprising a methylphosphonate group, nucleotides comprising a 5′-phosphate, and nucleotides comprising a 5′-phosphate mimic.

[0112] In certain embodiments, the ASO comprises an RNA polynucleotide chemically modified to be resistant to one or more nucleases (e.g., nuclear RNases (e.g., the exosome complex or RNaseH)). In some embodiments, all nucleotide bases are modified in the ASO. In certain embodiments, the chemical modifications comprises β-D-ribonucleotides nucleotides, 2′-modified nucleotides (e.g., 2′-O-(2-Methoxyethyl) (2′-MOE), 2′-O—CH₃, or 2′-fluoro-arabino (FANA)), bicyclic sugar modified nucleotides (e.g., having a constrained ethyl or locked nucleic acid (LNA)), and/or one or more modified internucleotide bonds (e.g., phosphorothioate internucleotide linkage). In certain embodiments, the chemical modification comprises 2′-MOE and a phosphorothioate internucleotide bond. In certain embodiments, at least 8, 9, 10, 11, 12, 13, 14, 15, 16, 17, 18, 19, 20, or more consecutive nucleotides of the ASO are modified by 2′-MOE. In certain embodiments, each nucleotide of the ASO is modified by 2′-MOE. In certain embodiments, at least 7, 8, 9, 10, 11, 12, 13, 14, 15, 16, 17, 18, 19, 20, or more consecutive internucleotide bonds of the ASO are phosphorothioate internucleotide bonds. In certain embodiments, each internucleotide bond of the ASO is a phosphorothioate internucleotide bond.

[0113] Internucleotide linkage modifications that can be used with the ASOs of the present disclosure include, but are not limited to, phosphorothioate “PS” (P(S), phosphoramidate (P(NR₁R₂) such as dimethylaminophosphoramidate (P(N(CH₁)₂)), phospbonocarboxylate (P(CH₂)ₙCOOR) such as phosphonoacetate “PACE” (P(CH₂COO⁻)), thiophosphonocarboxylate ((S)P(CH₂)ₙCOOR) such as thiophosphonoacetate “thioPACE” ((S)P(CH₂COO⁻)), alkylphosphonate (P(C₁₋₃alkyl) such as methylphosphonate —P(CH₃), boranophosphonate (P(BH3)), and phosphorodithioate (P(S)₂).

[0114] In some embodiments, an ASO provided herein comprises at least 1, 2, 3,4, 5, 6, 7, 8, 9, 10, 11, 12, 13, 14, 15, 16, 17, 18, 19, 20, 21, 22, 23, 24, 25, 26, 27, 28, 29, 30, 31, 32, 33, 34, 35, 36, 37, 38, 39, 40, 41, 42, 43, 44, 45, 46, 47, 48, 49, 50, or more PO bonds. In some embodiments, all internucleotide bonds of an ASO provided herein are PO internucleotide bonds. In some embodiments, an ASO provided herein does not comprise PO internucleotide bonds. In some embodiments, an ASO provided herein comprises at least 1, 2, 3,4, 5, 6, 7, 8, 9, 10, 11, 12, 13, 14, 15, 16, 17, 18, 19, 20, 21, 22, 23, 24, 25, 26, 27, 28, 29, 30, 31, 32, 33, 34, 35, 36, 37, 38, 39, 40, 41, 42, 43, 44, 45, 46, 47, 48, 49, 50, or more PS internucleotide bonds. In some embodiments, all internucleotide bonds of an ASO provided herein are PS bonds. In some embodiments, an ASO provided herein does not comprise PS internucleotide bonds.

[0115] In some embodiments, an ASO provided herein comprises at least 1, 2, 3,4, 5, 6, 7, 8, 9, 10, 11, 12, 13, 14, 15, 16, 17, 18, 19, 20, 21, 22, 23, 24, 25, 26, 27, 28, 29, 30, 31, 32, 33, 34, 35, 36, 37, 38, 39, 40, 41, 42, 43, 44, 45, 46, 47, 48, 49, 50, or more PS bonds. In some embodiments, all internucleotide bonds of an ASO provided herein are PS internucleotide bonds. In some embodiments, an ASO provided herein does not comprise PS internucleotide bonds. In some embodiments, an ASO provided herein comprises at least 1, 2, 3,4, 5, 6, 7, 8, 9, 10, 11, 12, 13, 14, 15, 16, 17, 18, 19, 20, 21, 22, 23, 24, 25, 26, 27, 28, 29, 30, 31, 32, 33, 34, 35, 36, 37, 38, 39, 40, 41, 42, 43, 44, 45, 46, 47, 48, 49, 50, or more PS internucleotide bonds. In some embodiments, all internucleotide bonds of an ASO provided herein are PO bonds. In some embodiments, an ASO provided herein does not comprise PO internucleotide bonds.

[0116] In certain embodiments, the ASO comprises one or more chemical modifications at the 5′ end, the 3′ end, or both. Without wishing to be bound by theory, chemical modifications at one or both termini of a polynucleotide (e.g., polyribonucleotide) may stabilize the polynucleotide. In certain embodiments, the ASO comprises one or more chemical modifications in at least 1, 2, 3, 4, or 5 nucleotides at the 5′ end of the ASO. In certain embodiments, the ASO comprises one or more chemical modifications in at least 1, 2, 3, 4, or 5 nucleotides at the 3′ end of the ASO. In certain embodiments, the ASO comprises one or more chemical modifications in at least 1, 2, 3, 4, or 5 nucleotides at the 5′ end of the ASO and one or more chemical modifications in at least 1, 2, 3, 4, or 5 nucleotides at the 3′ end of the ASO.

[0117] The chemical structures can also be described in writing. In such cases, ‘M’ indicates MOE; ‘d’ indicates DNA, ‘L’ indicates LNA, “m” indicates 2′ OMethyl, ‘=’ indicates a phosphorothioate (PS) linkage, ‘-’ indicates a phosphodiester (PO) linkage; ‘*’ or ‘5C’ indicates 5-MethylCytosine, ‘ag’ indicates GalNAc, ‘tg’ or “teg” indicates Teg-GalNAc, ‘\hat{ }’ indicates FANA, “BioTeg” indicates Biotin; “Palm” indicates Palmitic acid; and “C18” indicates a Spacer 18 moiety.

[0118] To avoid ambiguity, this LNA has the formula:

[chemical structure]

wherein B is the particular designated base.

[0119] Exemplary visual representation of ASOs with chemical modifications are provided in FIGS. 11 and 12. Additional exemplary ASOs with chemical modifications are provided in Table 2. In some embodiments, an ASO provided herein comprises a nucleotide sequence and/or a chemical modification of any one of the ASOs provided in Table 2. In some embodiments, the ASO comprises a sequence and chemical modification selected from the group consisting of SEQ ID NOs: 14-644. In some embodiments, the ASO comprises a sequence and chemical modification selected from the group consisting of SEQ ID NOs: 14-103, 104-138, 139-148, 149-168, 169-216, 217-272, 273-381, 382-389, 390-407, 408-462, 464, 467-478, 479-514, 515, 516-528, 530-623, 625-644.

[0120] In some embodiments, an ASO provided herein comprises a nucleotide sequence of any one of the ASOs provided in Tables 3, 4, 5, 6, 7, 8, 9, 10, or 11. In some embodiments, the ASO comprises a sequence selected from the group consisting of SEQ ID NOs: 645-954, 955-1517, 1518-2057, 2058-2308, 2309-2806, 2807-3956, 3957-4061, 4062-5228, 5229-5519, and 5520-6021. In some embodiments, the ASO comprising a sequence selected from the group consisting of SEQ ID NOs: 645-954, 955-1517, 1518-2057, 2058-2308, 2309-2806, 2807-3956, 3957-4061, 4062-5228, 5229-5519, and 5520-6021 further comprises any chemical modification as disclosed herein.

### High Affinity Modified Nucleotides

[0121] A high affinity modified nucleotide is a modified nucleotide which, when incorporated into the oligonucleotide enhances the affinity of the oligonucleotide for its complementary target, for example as measured by the melting temperature (Tm). A high affinity modified nucleotide of the present disclosure preferably result in an increase in melting temperature between +0.5 to +12° C., such as between +1.5 to +10° C. or +3 to +8° C. per modified nucleotide. Numerous high affinity modified nucleotides are known in the art and include for example, many 2′ substituted nucleotides as well as locked nucleic acids (LNA) (see e.g., Freier & Altmann (1997) Nucl. Acid Res., 25:4429-4443 and Uhlmann (2000) Curr. Opinion in Drug Development, 3 (2), 203-213), each of which are hereby incorporated by reference.

### Sugar Modifications

[0122] The ASOs described herein may comprise one or more nucleotides which have a modified sugar moiety, i.e. a modification of the sugar moiety when compared to the ribose sugar moiety found in DNA and RNA. Numerous nucleotides with modification of the ribose sugar moiety have been made, primarily with the aim of improving certain properties of oligonucleotides, such as affinity and/or nuclease resistance. Such modifications include those where the ribose ring structure is modified, e.g. by replacement with a hexose ring (HNA), or a bicyclic ring, which typically have a biradical bridge between the C2 and C4 carbons on the ribose ring (LNA), or an unlinked ribose ring which typically lacks a bond between the C2 and C3 carbons (e.g. UNA). Other sugar modified nucleotides include, for example, bicyclohexose nucleic acids (WO2011/017521) or tricyclic nucleic acids (WO2013/154798), both of which are hereby incorporated by reference. Modified nucleotides also include nucleotides where the sugar moiety is replaced with a non-sugar moiety, for example in the case of peptide nucleic acids (PNA), or morpholino nucleic acids.

[0123] Sugar modifications also include modifications made via altering the substituent groups on the ribose ring to groups other than hydrogen, or the 2′—OH group naturally found in RNA nucleotides. Substituents may, for example be introduced at the 2′, 3′, 4′ or 5′ positions.

[0124] In some embodiments, oligonucleotides comprise modified sugar moieties, such as any one of a 2′-O-methyl (2′OMe) moiety, a 2′-O-methoxyethyl moiety, a bicyclic sugar moiety, PNA (e.g., an oligonucleotide comprising one or more N-(2-aminoethyl)-glycine units linked by amide bonds or carbonyl methylene linkage as repeating units in place of a sugar-phosphate backbone), locked nucleotide (LNA) (e.g., an oligonucleotide comprising one or more locked ribose, and can be a mixture of 2′-deoxy nucleotides or 2′OMe nucleotides), cET (e.g., an oligonucleotide comprising one or more cET sugar), cMOE (e.g., an oligonucleotide comprising one or more cMOE sugar), morpholino oligomer (e.g., an oligonucleotide comprising a backbone comprising one or more phosphorodiamidate morpholiono oligomers), 2′-deoxy-2′-fluoro nucleotide (e.g., an oligonucleotide comprising one or more 2′-fluoro-β-D-arabinonucleotide), tcDNA (e.g., an oligonucleotide comprising one or more tcDNA modified sugar), constrained ethyl 2′-4′-bridged nucleic acid (cEt), S-cEt, ethylene bridged nucleic acid (ENA) (e.g., an oligonucleotide comprising one or more ENA modified sugar), hexitol nucleic acids (HNA) (e.g., an oligonucleotide comprising one or more HNA modified sugar), or tricyclic analog (tcDNA) (e.g., an oligonucleotide comprising one or more tcDNA modified sugar).

[0125] In some embodiments, oligonucleotides comprise nucleobase modifications selected from the group consisting of 2-thiouracil (“2-thioU”), 2-thiocytosine (“2-thioC”), 4-thiouracil (“4-thioU”), 6-thioguanine (“6-thioG”), 2-aminoadenine (“2-aminoA”), 2-aminopurine, pseudouracil, hypoxanthine, 7-deazaguanine, 7-deaza-8-azaguanine, 7-deazaadenine, 7-deaza-8-azaadenine, 5-methylcytosine (“5-methylC”), 5-methyluracil (“5-methylU”), 5-hydroxymethylcytosine, 5-hydroxymethyluracil, 5,6-dehydrouracil, 5-propynylcytosine, 5-propynyluracil, 5-ethynylcytosine, 5-ethynyluracil, 5-allyluracil (“5-allylU”), 5-allylcytosine (“5-allylC”), 5-aminoallyluracil (“5-aminoallylU”), 5-aminoallyl-cytosine (“5-aminoallyIC”), an abasic nucleotide, Z base, P base, Unstructured Nucleic Acid (“UNA”), isoguanine (“isoG”), and isocytosine (“isoC”), glycerol nucleic acid (GNA), thiomorpholino (C4H9NS) or thiophosphoramidate morpholinos (TMOs). Synthesis of glycerol nucleic acid (GNA) (also known as glycol nucleic acids) is described in Zhang et al, Current Protocols in Nucleic Acid Chemistry 4.40.1-4.40.18, September 2010, hereby incorporated by reference. Synthesis of thiophosphoramidate Morpholino Oligonucleotides is described in Langer et al, J. Am. Chem. Soc. 2020, 142 (38): 16240-53

### 2′ Sugar Modified Nucleotides

[0126] A 2′ sugar modified nucleotide is a nucleotide which has a substituent other than H or —OH at the 2′ position (2′ substituted nucleotide) or comprises a 2′ linked biradical capable of forming a bridge between the 2′ carbon and a second carbon in the ribose ring, such as LNA (2′-4′ biradical bridged) nucleotides.

[0127] Without wishing to be bound by theory, the 2′ modified sugar may provide enhanced binding affinity and/or increased nuclease resistance to the oligonucleotide. Examples of 2′ substituted modified nucleotides are 2′-O-alkyl-RNA, 2′-O-methyl-RNA, 2′-alkoxy-RNA, 2′-O-methoxyethyl-RNA (MOE), 2′-amino-DNA, 2′-Fluoro-RNA, and 2′-F-ANA nucleotide. For further examples, see e.g., Freier & Altmann 1997, supra; Uhlmann 2000, supra, and Deleavey and Damha (2012) Chemistry and Biology 19:937, each of which are hereby incorporated by reference., each of which are hereby incorporated by reference.

Locked Nucleic Acid nucleotides (LNA Nucleotide)

[0128] A “LNA nucleotide” is a 2′-sugar modified nucleotide which comprises a biradical linking the C2′ and C4′ of the ribose sugar ring of said nucleotide (also referred to as a “2′-4′ bridge”), which restricts or locks the conformation of the ribose ring. In other words, a locked nucleotide is a nucleotide comprising a bicyclic sugar moiety comprising a 4′-CH₂—O-2′ bridge. This structure effectively “locks” the ribose in the 3′-endo structural conformation. The addition of locked nucleotides to oligonucleotides has been shown to increase oligonucleotide stability in serum, and to reduce off-target effects (Grunweller, A. et al., (2003) Nucleic Acids Research 31 (12): 3185-3193). These nucleotides are also sometimes termed bridged nucleic acid or bicyclic nucleic acid (BNA). The locking of the conformation of the ribose is associated with an enhanced affinity of hybridization (duplex stabilization) when the LNA is incorporated into an oligonucleotide with complementarity to an RNA or a DNA molecule. This can be routinely determined by measuring the melting temperature of the oligonucleotide/complement duplex. Exemplary LNA nucleotides include beta-D-oxy-LNA, 6′-methyl-beta-D-oxy LNA such as (S)-6′-methyl-beta-D-oxy-LNA (ScET) and ENA.

[0129] Examples of bicyclic nucleotides for use in the polynucleotides of the disclosure include without limitation nucleotides comprising a bridge between the 4′ and the 2′ ribosyl ring atoms. In certain embodiments, the polynucleotide agents of the disclosure include one or more bicyclic nucleotides comprising a 4′ to 2′ bridge. Examples of such 4′ to 2′ bridged bicyclic nucleotides, include but are not limited to 4′-(CH₂)—O-2′ (LNA); 4′-(CH₂)—S-2′; 4′-(CH₂)₂—O-2′ (ENA); 4′-CH(CH₃)—O-2′ (also referred to as “constrained ethyl” or “cEt”) and 4′-CH(CH₂OCH₃)—O-2′ (and analogs thereof; see, e.g., U.S. Pat. No. 7,399,845); 4′-C(CH₃)(CH₃)—O-2′ (and analogs thereof; see e.g., U.S. Pat. No. 8,278,283); 4′-CH₂—N(OCH₃)-2′ (and analogs thereof; see e.g., U.S. Pat. No. 8,278,425); 4′-CH₂—O—N(CH₃)₂-2′ (see, e.g., U.S. Patent Publication No. 2004/0171570); 4′-CH₂—N(R)—O-2′, wherein R is H, C₁-C₁₂ alkyl, or a protecting group (see, e.g., U.S. Pat. No. 7,427,672); 4′-CH₂—C(H)(CH₃)-2′ (see, e.g., Chattopadhyaya et al., J. Org. Chem., 2009, 74, 118-134); and 4′-CH₂—C(═CH₂)-2′ (and analogs thereof; see, e.g., U.S. Pat. No. 8,278,426). The entire contents of each of the foregoing are hereby incorporated herein by reference.

[0130] Additional representative U.S. Patents and US Patent Publications that teach the preparation of locked nucleic acid nucleotides include, but are not limited to, the following: U.S. Pat. Nos. 6,268,490; 6,525,191; 6,670,461; 6,770,748; 6,794,499; 6,998,484; 7,053,207; 7,034,133; 7,084,125; 7,399,845; 7,427,672; 7,569,686; 7,741,457; 8,022,193; 8,030,467; 8,278,425; 8,278,426; 8,278,283; US 2008/0039618; and US 2009/0012281, the entire contents of each of which are hereby incorporated herein by reference.

[0131] Any of the foregoing bicyclic nucleotides can be prepared having one or more stereochemical sugar configurations including for example α-L-ribofuranose and β-D-ribofuranose (see PCT Application Publication No. WO 99/14226, contents of which are incorporated by reference herein).

[0132] An oligonucleotide of the disclosure can also be modified to include one or more constrained ethyl nucleotides. As used herein, a “constrained ethyl nucleotide” or “cEt” is a locked nucleotide comprising a bicyclic sugar moiety comprising a 4′-CH(CH₃)—O-2′ bridge. In one embodiment, a constrained ethyl nucleotide is in the S conformation referred to herein as “S-cEt.”

[0133] An oligonucleotide of the disclosure may also include one or more “conformationally restricted nucleotides” (“CRN”). CRN are nucleotide analogs with a linker connecting the C2′ and C4′ carbons of ribose or the C3 and —C5′ carbons of ribose. CRN lock the ribose ring into a stable conformation and increase the hybridization affinity to an RNA (e.g., a regRNA or a mRNA). The linker is of sufficient length to place the oxygen in an optimal position for stability and affinity resulting in less ribose ring puckering.

[0134] Representative publications that teach the preparation of certain of the above noted CRN include, but are not limited to, US Patent Publication No. 2013/0190383; and PCT publication WO 2013/036868, the entire contents of each of which are hereby incorporated herein by reference.

[0135] In some embodiments, an oligonucleotide of the disclosure comprises one or more monomers that are UNA (unlocked nucleotide) nucleotides. UNA is unlocked acyclic nucleotide, wherein any of the bonds of the sugar has been removed, forming an unlocked “sugar” residue. In one example, UNA also encompasses monomers with bonds between C1′-C4′ have been removed (i.e., the covalent carbon-oxygen-carbon bond between the C1′ and C4′ carbons). In another example, the C2′-C3′ bond (i.e., the covalent carbon-carbon bond between the C2′ and C3′ carbons) of the sugar has been removed (see Nuc. Acids Symp. Series, 52, 133-134 (2008) and Fluiter et al., Mol. Biosyst., 2009, 10, 1039 hereby incorporated by reference).

[0136] Representative U.S. publications that teach the preparation of UNA include, but are not limited to, U.S. Pat. No. 8,314,227; and US Patent Publication Nos. 2013/0096289; 2013/0011922; and 2011/0313020, the entire contents of each of which are hereby incorporated herein by reference.

[0137] The ribose sugar may also be modified with a cyclopropane ring to produce a tricyclodeoxynucleic acid (tricyclo DNA). The ribose moiety may be substituted for another sugar such as 1,5,-anhydrohexitol, threose to produce a threose nucleotide (TNA), or arabinose to produce an arabino nucleotide. The ribose molecule can also be replaced with non-sugars such as cyclohexene to produce cyclohexene nucleotide or glycol to produce glycol nucleotides.

[0138] Potentially stabilizing modifications to the ends of nucleotide molecules can include N-(acetylaminocaproyl)-4-hydroxyprolinol (Hyp-C6-NHAc), N-(caproyl-4-hydroxyprolinol (Hyp-C6), N-(acetyl-4-hydroxyprolinol (Hyp-NHAc), thymidine-2′-O-deoxythymidine (ether), N-(aminocaproyl)-4-hydroxyprolinol (Hyp-C6-amino), 2-docosanoyl-uridine-3″-phosphate, inverted base dT (idT) and others. Disclosure of this modification can be found in PCT Publication No. WO 2011/005861.

[0139] Other alternatives chemistries of an oligonucleotide of the disclosure include a 5′ phosphate or 5′ phosphate mimic, e.g., a 5′-terminal phosphate or phosphate mimic of an oligonucleotide. Suitable phosphate mimics are disclosed in, for example US Patent Publication No. 2012/0157511, the entire contents of which are incorporated herein by reference.

[0140] Additional non-limiting, exemplary LNA nucleotides are disclosed in WO 99/014226, WO 00/66604, WO 98/039352, WO 2004/046160, WO 00/047599, WO 2007/134181, WO 2010/077578, WO 2010/036698, WO 2007/090071, WO 2009/006478, WO 2011/156202, WO 2008/154401, WO 2009/067647, WO 2008/150729, Morita et al., Bioorganic & Med. Chem. Lett. 12, 73-76, Seth et al. J. Org. Chem. 2010, Vol 75 (5) pp. 1569-81, Mitsuoka et al., Nucleic Acids Research 2009, 37 (4), 1225-1238, and Wan and Seth, J. Medical Chemistry 2016, 59, 9645-9667, each of which are hereby incorporated by reference.

[0141] In some embodiments, the length of the ASO is 5×n+5 nucleotides (n is an integer of 3 or greater), wherein the nucleotides at positions 5×m are ribonucleotides modified by LNA (m is an integer from 1 to n) and the nucleotides at the remaining positions are ribonucleotides modified by 2′-O-methoxyethyl.

[0142] In some embodiments, the nucleotide sugar modification is 2′-O—C1-4alkyl such as 2′-O-methyl (2′-OMe), 2′-deoxy (2′-H), 2′-O—C1-3alkyl-O—C1-3alkyl such as 2′-methoxyethyl (‘2’-MOE″), 2′-fluoro (“2′-F”), 2′-amino (“2′—NH2”), 2′-arabinosyl (“2′-arabino”) nucleotide, 2′-F-arabinosyl (“2′-F-arabino”) nucleotide, 2′ locked nucleic acid (“LNA”) nucleotide, 2′-amido bridge nucleic acid (AmNA), 2′-unlocked nucleic acid (“ULNA”) nucleotide, a sugar in L form (“L-sugar”), or 4′-thioribosyl nucleotide.

### Mixmers and Gapmers

[0143] The ASO can have a mixmer and/or gapmer structure, for example, in a pattern disclosed by the ASOs in FIGS. 11 and 12.

[0144] In certain embodiments, the ASO is a mixmer. As used herein, the term “mixmer” refers to an oligonucleotide comprising an alternating composition of DNA monomers and nucleotide analogue monomers across at least a portion of the oligonucleotide sequence. In certain embodiments, the ASO is a mixmer based on the gapmer structure, comprising a mixture of DNA nucleotides and 2′-MOE nucleotides in the gap, flanked by RNA sequences (e.g., 2′-modified RNA sequences) in the wings. Mixmers may be designed to comprise a mixture of affinity enhancing nucleotide analogues, such as in non-limiting example 2′-O-alkyl-RNA monomers, 2′-amino-DNA monomers, 2′-fluoro-DNA monomers, LNA monomers, arabino nucleic acid (ANA) monomers, 2′-fluoro-ANA monomers, HNA monomers, INA monomers, 2′-MOE-RNA (2′-O-methoxyethyl-RNA), 2′-Fluoro-DNA, and LNA. In some embodiments, the mixmer is incapable of recruiting RNase H. In some embodiments, the mixmer comprises one type of affinity enhancing nucleotide analogue together with DNA and/or RNA.

[0145] Multiple different modifications can be interspaced in a mixmer. For example, the ASO can comprise LNA modification in a plurality of nucleotides and a different modification in some or all of the rest of the nucleotides. In some embodiments, any two adjacent LNA-modified nucleotides are separated by at least 1, 2, 3, 4, or 5 nucleotides. Throughout the ASO, the distance between adjacent LNA-modified nucleotides can either be constant (e.g., any two adjacent LNA-modified nucleotides are separated by 1, 2, 3, 4, or 5 nucleotides) or variable. In some embodiments, the length of the ASO is 3×n, 3×n−1, or 3×n−2 nucleotides (n is an integer of 6 or greater), wherein (a) (i) the nucleotides at positions 3×m−2 (m is an integer from 1 to n) are nucleotides (e.g., ribonucleotides or deoxyribonucleotides) comprising a first modification (e.g., LNA), (ii) the nucleotides at positions 3×m−1 (m is an integer from 1 to n) are nucleotides (e.g., ribonucleotides or deoxyribonucleotides) comprising a first modification (e.g., LNA), or (iii) the nucleotides at positions 3×m (m is an integer from 1 to n) are nucleotides (e.g., ribonucleotides or deoxyribonucleotides) comprising a first modification (e.g., LNA); and (b) the nucleotides at the remaining positions comprise a second, different modification (e.g., 2′-O-methoxyethyl). In some embodiments, the length of the ASO is 2×n or 2×n−1 nucleotides (n is an integer of 9 or greater), wherein (a) (i) the nucleotides at positions 2×m−1 (m is an integer from 1 to n) are nucleotides (e.g., ribonucleotides or deoxyribonucleotides) comprising a first modification (e.g., LNA), or (ii) the nucleotides at positions 2×m (m is an integer from 1 to n) are nucleotides (e.g., ribonucleotides or deoxyribonucleotides) comprising a first modification (e.g., LNA); and (b) the nucleotides at the remaining positions comprise a second, different modification (e.g., 2′-O-methoxyethyl). Similar modification patterns, for example, where the first modification is repeated very 4, 5, or more nucleotides, are also contemplated. In some embodiments, the length of the ASO is 4×n, 4×n−1, or 4×n−2 nucleotides (n is an integer of 6 or greater), wherein (a) (i) the nucleotides at positions 4×m−2 (m is an integer from 1 to n) are nucleotides (e.g., ribonucleotides or deoxyribonucleotides) comprising a first modification (e.g., LNA), (ii) the nucleotides at positions 4×m−1 (m is an integer from 1 to n) are nucleotides (e.g., ribonucleotides or deoxyribonucleotides) comprising a first modification (e.g., LNA), or (iii) the nucleotides at positions 3×m (m is an integer from 1 to n) are nucleotides (e.g., ribonucleotides or deoxyribonucleotides) comprising a first modification (e.g., LNA); and (b) the nucleotides at the remaining positions comprise a second, different modification (e.g., 2′-O-methoxyethyl). In some embodiments, the length of the ASO is 5×n, 5×n−1, or 5×n−2 nucleotides (n is an integer of 6 or greater), wherein (a) (i) the nucleotides at positions 5×m−2 (m is an integer from 1 to n) are nucleotides (e.g., ribonucleotides or deoxyribonucleotides) comprising a first modification (e.g., LNA), (ii) the nucleotides at positions 5×m−1 (m is an integer from 1 to n) are nucleotides (e.g., ribonucleotides or deoxyribonucleotides) comprising a first modification (e.g., LNA), or (iii) the nucleotides at positions 5×m (m is an integer from 1 to n) are nucleotides (e.g., ribonucleotides or deoxyribonucleotides) comprising a first modification (e.g., LNA); and (b) the nucleotides at the remaining positions comprise a second, different modification (e.g., 2′-O-methoxyethyl).

[0146] In some embodiments, the ASO further comprises a GalNAc or Teg-GalNAc moiety at the 5′ or 3′ end of the ASO.

[0147] In certain embodiments, the ASO comprises a DNA sequence (e.g., having at least 1, 2, 3, 4, 5, 6, 7, 8, 9, 10, 11, 12, 13, 14, or 15 contiguous nucleotides of unmodified DNA) flanked on both sides by RNA sequences. Such structure is known as “gapmer,” in which the DNA region is referred to as the “gap” and the RNA regions is referred to as the “wings” (see, e.g., PCT Application Publication No. WO2013/177248). Gapmers were known to facilitate degradation of the target RNA by recruiting nucleases (e.g., nuclear RNAses (e.g., RNase H)). Surprisingly, in some embodiments of the present disclosure, it has been discovered that a gapmer that binds to a regRNA having the same sequence as having a parent ASO but having different chemical modifications, can also increase target gene expression. In certain embodiments, the ASO comprises a DNA sequence flanked by RNA sequences and does not induce RNAse-or RNAse H-mediated degradation.

[0148] In some embodiments, the ASO gapmer comprises an internal DNA region flanked by two external RNA “wings.” For example, the internal DNA gap can comprise at least 49, 48, 47, 46, 45, 44, 43, 42, 41, 40, 39, 38, 37, 36, 35, 34, 33, 32, 31, 30, 29, 28, 27, 26, 25, 24, 23, 22, 21, 20, 19, 18, 17, 16, 15, 14, 13, 12, 11, 10, 9, 8, 7, 6, 5, 4, 3, 2, or 1 nucleotide(s), while each of the external RNA wing(s) can independently comprise 1, 2, 3, 4, 5, 6, 7, 8, 9, 10, 11, 12, 13, 14, 15, 16, 17, 18, 19, 20, 21, 22, 23, 24, 25, 26, 27, 28, 29, 30, 31, 32, 33, 34, 35, 36, 37, 38, 39, 40, 41, 42, 43, 44, 45, 46, 47, 48, 49, 50 or more nucleotides. Exemplary gapmer structures include, but are not limited to a 1-10-9, 2-10-8, 3-10-7, 4-10-6, 6-10-4, 7-10-3, 8-10-2, 9-10-1, 1-18-1, 2-16-2, 3-14-3, 4-12-4, 5-10-5, 6-8-6, 7-6-7, 8-5-7, 7-5-8, 8-4-8, or 9-2-9 structure where the first and third number indicate the number of external RNA nucleotides and the second number indicates the number of internal DNA nucleotides.

[0149] The ASO can also be a mixmer comprising one DNA region linked to one RNA region. In some embodiments, the mixmer comprises at least 10 DNA nucleotides linked to at least 10 RNA nucleotides, wherein the DNA nucleotides are at the 5′ end of the mixmer or the 3′ end of the mixmer. In some embodiments, the mixmer comprises at least 1, 2, 3, 4, 5, 6, 7, 8, 9, 10, 11, 12, 13, 14, 15, 16, 17, 18, or 19 DNA nucleotide(s) linked to at least 49, 48, 47, 46, 45, 44, 43, 42, 41, 40, 39, 38, 37, 36, 35, 34, 33, 32, 31, 30, 29, 28, 27, 26, 25, 24, 23, 22, 21, 20, 19, 18, 17, 16, 15, 14, 13, 12, 11, 10, 9, 8, 7, 6, 5, 4, 3, 2, or 1 RNA nucleotide(s), wherein the DNA nucleotides are at the 5′ end of the mixmer or the 3′ end of the mixmer. In some embodiment, the RNA regions of the gapmer or mixmer can comprise any additional chemical modification as disclosed herein.

[0150] In certain embodiments, the ASO (e.g., the gapmer or mixmer) is about 8, 9, 10, 11, 12, 13, 14, 15, 16, 17, 18, 19, 20, 21, 22, 23, 24, 25, 26, 27, 28, 29, 30, 31, 32, 33, 34, 35, 36, 37, 38, 39, 40, 41, 42, 43, 44, 45, 46, 47, 48, 49, 50 or more nucleotides in length. In certain embodiments, the gap is about 1, 2, 3, 4, 5, 6, 7, 8, 9, 10, 11, 12, 13, 14, 15, 16, 17, 18, 19, or more nucleotides in length. In certain embodiments, one or both wings are about 2, 3, 4, 5, 6, 7, 8, 9, 10, 11, 12, 13, 14, 15, 16, 17, 18, or 19 or more nucleotides in length. In certain embodiments, one or both wings comprises RNA modifications, for example, β-D-ribo nucleotides, 2′-modified nucleotides (e.g., 2′-O-(2-Methoxyethyl) (2′-MOE), 2′-O—CH₃, or 2′-fluoro-arabino (FANA)), and bicyclic sugar modified nucleotides (e.g., having a constrained ethyl or locked nucleic acid (LNA)). In certain embodiments, each ribonucleotide in the mixmer or gapmer is modified by 2′-MOE. In certain embodiments, the mixmer or gapmer comprises one or more modified internucleotide bonds, e.g., phosphorothioate (PS) internucleotide linkage. In certain embodiments, each two adjacent nucleotides in the mixmer or gapmer are linked by a phosphorothioate internucleotide bond.

[0151] In certain embodiments, the ASO does not comprise 1 or more, 2 or more, 3 or more, 4 or more, 5 or more, 6 or more, 7 or more, 8 or more, 9 or more, 10 or more, 10 or more, 11 or more, 12 or more, 13 or more, 14 or more, 15 or more, 20 or more, 25 or more, 30 or more, 35 or more, 40 or more, or 45 or more contiguous nucleotides of unmodified DNA. In some embodiments, such a DNA sequence is disrupted by modified (e.g., 2′-MOE modified) ribonucleotides every 2, 3, 4, 5, or more nucleotides. In some embodiments, the ASO comprises only ribonucleotides and no deoxyribonucleotides.

[0152] The structural features of mixmer and gapmer can be combined. In certain embodiments, the ASO has a structure similar to that of a mixmer disclosed herein (e.g., one having interspaced modifications), except that the second modification in the gap is changed to a third modification (e.g., deoxyribonucleotide). In certain embodiments, the ASO has a structure similar to that of a gapmer disclosed herein, except that in the gap the nucleotides are modified in a mixmer pattern.

[0153] In certain embodiments, the ASO further comprises a ligand moiety, e.g., a ligand moiety that specifically targets a tissue or organ in a subject. For example, N-Acetylgalactosamine (GalNAc) specifically targets liver. In certain embodiments, the ligand moiety comprises GalNAc. In certain embodiments, the ligand moiety comprises a three-cluster GalNAc moiety, commonly denoted GAINAc3. Other types of GalNAc moieties are one-cluster, two cluster or four cluster GAINAc, denoted as GAINAc1, GAINAc2, or GAINAc4. In certain embodiments, the ligand moiety comprises GalNAcl, GALNAc2, GAINAc3, or GalNAc4.

[0154] In certain embodiments, the ligand moiety comprises biotin. In certain embodiments, the ligand moiety comprises palmitic acid. In certain embodiments, the ligand moiety comprises a Spacer 18 moiety (C18).

### III. Pharmaceutical Compositions

[0155] In certain embodiments, an ASO disclosed herein can be present in pharmaceutical compositions. The pharmaceutical composition can be formulated for use in a variety of drug delivery systems. One or more pharmaceutically acceptable excipients or carriers can also be included in the composition for proper formulation. In some embodiments, the pharmaceutical acceptable carrier comprises sterile saline, sterile water, or phosphate buffered saline (PBS). Suitable formulations for use in the present disclosure are found in Remington's Pharmaceutical Sciences, Mack Publishing Company, Philadelphia, Pa., 17th ed., 1985. For a brief review of methods for drug delivery, see, e.g., Langer (Science 249:1527-1533, 1990).

[0156] Exemplary carriers and pharmaceutical formulations suitable for delivering nucleic acids are described in Durymanov and Reineke (2018) Front. Pharmacol. 9:971; Barba et al. (2019) Pharmaceutics 11 (8): 360; Ni et al. (2019) Life (Basel) 9 (3): 59, each of which is incorporated herein by reference. It is understood that the presence of a ligand moiety conjugated to the ASO may circumvent the need for a carrier for delivery to a tissue or organ targeted by the ligand moiety.

[0157] The delivery of an oligonucleotide of the disclosure to a cell e.g., a cell within a subject, such as a human subject e.g., a subject in need thereof, such as a subject having or at risk of developing cholestasis or a cholestatic liver disease can be achieved in a number of different ways. For example, delivery may be performed by contacting a cell with an oligonucleotide of the disclosure either in vitro or in vivo. In vivo delivery may also be performed directly by administering a composition comprising an oligonucleotide to a subject. These alternatives are discussed further below.

[0158] In general, any method of delivering a nucleic acid molecule (in vitro or in vivo) can be adapted for use with an oligonucleotide of the disclosure (see e.g., Akhtar S. and Julian R L., (1992) Trends Cell. Biol. 2 (5): 139-144 and WO 94/02595, which are incorporated herein by reference in their entireties). For in vivo delivery, factors to consider in order to deliver an oligonucleotide molecule include, for example, biological stability of the delivered molecule, prevention of non-specific effects, and accumulation of the delivered molecule in the target tissue. The non-specific effects of an oligonucleotide can be minimized by local administration, for example, by direct injection or implantation into a tissue or topically administering the preparation. Local administration to a treatment site maximizes local concentration of the agent, limits the exposure of the agent to systemic tissues that can otherwise be harmed by the agent or that can degrade the agent, and permits a lower total dose of the oligonucleotide molecule to be administered.

[0159] For administering an oligonucleotide systemically for the treatment of a disease, the oligonucleotide can include alternative nucleobases, alternative sugar moieties, and/or alternative internucleotide linkages, or alternatively delivered using a drug delivery system; both methods act to prevent the rapid degradation of the oligonucleotide by endo- and exo-nucleases in vivo. Modification of the oligonucleotide or the pharmaceutical carrier can also permit targeting of the oligonucleotide composition to the target tissue and avoid undesirable off-target effects. Oligonucleotide molecules can be modified by chemical conjugation to lipophilic groups such as cholesterol to enhance cellular uptake and prevent degradation. In an alternative embodiment, the oligonucleotide can be delivered using drug delivery systems such as a nanoparticle, a lipid nanoparticle, a polyplex nanoparticle, a lipoplex nanoparticle, a dendrimer, a polymer, liposomes, or a cationic delivery system. Positively charged cationic delivery systems facilitate binding of an oligonucleotide molecule (negatively charged) and also enhance interactions at the negatively charged cell membrane to permit efficient uptake of an oligonucleotide by the cell. Cationic lipids, dendrimers, or polymers can either be bound to an oligonucleotide, or induced to form a vesicle or micelle that encases an oligonucleotide. The formation of vesicles or micelles further prevents degradation of the oligonucleotide when administered systemically. In general, any methods of delivery of nucleic acids known in the art may be adaptable to the delivery of the oligonucleotides of the disclosure. Methods for making and administering cationic oligonucleotide complexes are well within the abilities of one skilled in the art (see e.g., Sorensen, D R., et al. (2003) J. Mol. Biol 327:761-766; Verma, U N. et al., (2003) Clin. Cancer Res. 9:1291-1300; Arnold, A S et al., (2007) J. Hypertens. 25:197-205, which are incorporated herein by reference in their entirety). Some non-limiting examples of drug delivery systems useful for systemic delivery of oligonucleotides include DOTAP (Sorensen, D R., et al (2003), supra; Verma, U N. et al., (2003), supra), Oligofectamine, “solid nucleic acid lipid particles” (Zimmermann, T S. et al., (2006) Nature 441:111-114), cardiolipin (Chien, P Y. et al., (2005) Cancer Gene Ther. 12:321-328; Pal, A. et al., (2005) Int J. Oncol. 26:1087-1091), polyethyleneimine (Bonnet M E. et al., (2008) Pharm. Res. August 16 Epub ahead of print; Aigner, A. (2006) J. Biomed. Biotechnol. 71659), Arg-Gly-Asp (RGD) peptides (Liu, S. (2006) Mol. Pharm. 3:472-487), and polyamidoamines (Tomalia, D A. et al., (2007) Biochem. Soc. Trans. 35:61-67; Yoo, H. et al., (1999) Pharm. Res. 16:1799-1804). In some embodiments, an oligonucleotide forms a complex with cyclodextrin for systemic administration. Methods for administration and pharmaceutical compositions of oligonucleotides and cyclodextrins can be found in U.S. Pat. No. 7,427,605, which is herein incorporated by reference in its entirety. In some embodiments the oligonucleotides of the disclosure are delivered by polyplex or lipoplex nanoparticles. Methods for administration and pharmaceutical compositions of oligonucleotides and polyplex nanoparticles and lipoplex nanoparticles can be found in U.S. Patent Application Nos. 2017/0121454; 2016/0369269; 2016/0279256; 2016/0251478; 2016/0230189; 2015/0335764; 2015/0307554; 2015/0174549; 2014/0342003; 2014/0135376; and 2013/0317086, which are herein incorporated by reference in their entirety.

### Membranous Molecular Assembly Delivery Methods

[0160] Oligonucleotides of the disclosure can also be delivered using a variety of membranous molecular assembly delivery methods including polymeric, biodegradable microparticle, or microcapsule delivery devices known in the art. For example, a colloidal dispersion system may be used for targeted delivery of an oligonucleotide agent described herein. Colloidal dispersion systems include macromolecule complexes, nanocapsules, microspheres, beads, and lipid-based systems including oil-in-water emulsions, micelles, mixed micelles, and liposomes. Liposomes are artificial membrane vesicles that are useful as delivery vehicles in vitro and in vivo. It has been shown that large unilamellar vesicles (LUV), which range in size from 0.2-4.0 μm can encapsulate a substantial percentage of an aqueous buffer containing large macromolecules. Liposomes are useful for the transfer and delivery of active ingredients to the site of action. Because the liposomal membrane is structurally similar to biological membranes, when liposomes are applied to a tissue, the liposomal bilayer fuses with bilayer of the cellular membranes. As the merging of the liposome and cell progresses, the internal aqueous contents that include the oligonucleotide are delivered into the cell where the oligonucleotide can specifically bind to a target RNA. In some cases, the liposomes are also specifically targeted, e.g., to direct the oligonucleotide to particular cell types. The composition of the liposome is usually a combination of phospholipids, usually in combination with steroids, especially cholesterol. Other phospholipids or other lipids may also be used. The physical characteristics of liposomes depend on pH, ionic strength, and the presence of divalent cations.

[0161] A liposome containing an oligonucleotide can be prepared by a variety of methods. In one example, the lipid component of a liposome is dissolved in a detergent so that micelles are formed with the lipid component. For example, the lipid component can be an amphipathic cationic lipid or lipid conjugate. The detergent can have a high critical micelle concentration and may be nonionic. Exemplary detergents include cholate, CHAPS, octylglucoside, deoxycholate, and lauroyl sarcosine. The oligonucleotide preparation is then added to the micelles that include the lipid component. The cationic groups on the lipid interact with the oligonucleotide and condense around the oligonucleotide to form a liposome. After condensation, the detergent is removed, e.g., by dialysis, to yield a liposomal preparation of oligonucleotide.

[0162] If necessary, a carrier compound that assists in condensation can be added during the condensation reaction, e.g., by controlled addition. For example, the carrier compound can be a polymer other than a nucleic acid (e.g., spermine or spermidine). The pH can also be adjusted to favor condensation.

[0163] Methods for producing stable polynucleotide delivery vehicles, which incorporate a polynucleotide/cationic lipid complex as a structural component of the delivery vehicle, are further described in, e.g., WO 96/37194, the entire contents of which are incorporated herein by reference. Liposome formation can also include one or more aspects of exemplary methods described in Feigner, P. L. et al., (1987) Proc. Natl. Acad. Sci. USA 8:7413-7417; U.S. Pat. Nos. 4,897,355; 5,171,678; Bangham et al., (1965) M. Mol. Biol. 23:238; Olson et al., (1979) Biochim. Biophys. Acta 557:9; Szoka et al., (1978) Proc. Natl. Acad. Sci. 75:4194; Mayhew et al., (1984) Biochim. Biophys. Acta 775:169; Kim et al., (1983) Biochim. Biophys. Acta 728:339; and Fukunaga et al., (1984) Endocrinol. 115:757. Commonly used techniques for preparing lipid aggregates of appropriate size for use as delivery vehicles include sonication and freeze-thaw plus extrusion (see, e.g., Mayer et al., (1986) Biochim. Biophys. Acta 858:161. Microfluidization can be used when consistently small (50 to 200 nm) and relatively uniform aggregates are desired (Mayhew et al., (1984) Biochim. Biophys. Acta 775:169). These methods are readily adapted to packaging oligonucleotide preparations into liposomes.

[0164] Liposomes fall into two broad classes. Cationic liposomes are positively charged liposomes which interact with the negatively charged nucleic acid molecules to form a stable complex. The positively charged nucleic acid/liposome complex binds to the negatively charged cell surface and is internalized in an endosome. Due to the acidic pH within the endosome, the liposomes are ruptured, releasing their contents into the cell cytoplasm (Wang et al. (1987) Biochem. Biophys. Res. Commun., 147:980-985).

[0165] Liposomes, which are pH-sensitive or negatively charged, entrap nucleic acids rather than complex with them. Since both the nucleic acid and the lipid are similarly charged, repulsion rather than complex formation occurs. Nevertheless, some nucleic acid is entrapped within the aqueous interior of these liposomes. pH sensitive liposomes have been used to deliver nucleic acids encoding the thymidine kinase gene to cell monolayers in culture. Expression of the exogenous gene was detected in the target cells (Zhou et al. (1992) Journal of Controlled Release, 19:269-274).

[0166] One major type of liposomal composition includes phospholipids other than naturally derived phosphatidylcholine. Neutral liposome compositions, for example, can be formed from dimyristoyl phosphatidylcholine (DMPC) or dipalmitoyl phosphatidylcholine (DPPC). Anionic liposome compositions generally are formed from dimyristoyl phosphatidylglycerol, while anionic fusogenic liposomes are formed primarily from dioleoyl phosphatidylethanolamine (DOPE). Another type of liposomal composition is formed from phosphatidylcholine (PC) such as, for example, soybean PC, and egg PC. Another type is formed from mixtures of phospholipid and/or phosphatidylcholine and/or cholesterol.

[0167] Examples of other methods to introduce liposomes into cells in vitro and in vivo include U.S. Pat. Nos. 5,283,185; 5,171,678; WO 94/00569; WO 93/24640; WO 91/16024; Feigner, (1994) J. Biol. Chem. 269:2550; Nabel, (1993) Proc. Natl. Acad. Sci. 90:11307; Nabel, (1992) Human Gene Ther. 3:649; Gershon, (1993) Biochem. 32:7143; and Strauss, (1992) EMBO J. 11:417.

[0168] Non-ionic liposomal systems have also been examined to determine their utility in the delivery of drugs to the skin, in particular systems comprising non-ionic surfactant and cholesterol. Non-ionic liposomal formulations comprising NOVASOME™ I (glyceryl dilaurate/cholesterol/polyoxyethylene-10-stearyl ether) and NOVASOME™ II (glyceryl distearate/cholesterol/polyoxyethylene-10-stearyl ether) were used to deliver cyclosporin-A into the dermis of mouse skin. Results indicated that such non-ionic liposomal systems were effective in facilitating the deposition of cyclosporine A into different layers of the skin (Hu et al., (1994) S.T.P.Pharma. Sci., 4 (6): 466).

[0169] Liposomes may also be sterically stabilized liposomes, comprising one or more specialized lipids that result in enhanced circulation lifetimes relative to liposomes lacking such specialized lipids. Examples of sterically stabilized liposomes are those in which part of the vesicle-forming lipid portion of the liposome (A) comprises one or more glycolipids, such as monosialoganglioside G_{M1}, or (B) is derivatized with one or more hydrophilic polymers, such as a polyethylene glycol (PEG) moiety. While not wishing to be bound by any particular theory, it is thought in the art that, at least for sterically stabilized liposomes containing gangliosides, sphingomyelin, or PEG-derivatized lipids, the enhanced circulation half-life of these sterically stabilized liposomes derives from a reduced uptake into cells of the reticuloendothelial system (RES) (Allen et al., (1987) FEBS Letters, 223:42; Wu et al., (1993) Cancer Research, 53:3765).

[0170] Various liposomes comprising one or more glycolipids are known in the art. Papahadjopoulos et al. (Ann. N.Y. Acad. Sci., (1987), 507:64) reported the ability of monosialoganglio side G^{M1}, galactocerebroside sulfate, and phosphatidylinositol to improve blood half-lives of liposomes. These findings were expounded upon by Gabizon et al. (Proc. Natl. Acad. Sci. U.S.A., (1988), 85:6949). U.S. Pat. No. 4,837,028 and WO 88/04924, both to Allen et al., disclose liposomes comprising (1) sphingomyelin and (2) the ganglioside Gun or a galactocerebroside sulfate ester. U.S. Pat. No. 5,543,152 (Webb et al.) discloses liposomes comprising sphingomyelin. Liposomes comprising 1,2-sn-dimyristoylphosphatidylcholine are disclosed in WO 97/13499 (Lim et al).

[0171] In one embodiment, cationic liposomes are used. Cationic liposomes possess the advantage of being able to fuse to the cell membrane. Non-cationic liposomes, although not able to fuse as efficiently with the plasma membrane, are taken up by macrophages in vivo and can be used to deliver oligonucleotides to macrophages.

[0172] Further advantages of liposomes include: liposomes obtained from natural phospholipids are biocompatible and biodegradable; liposomes can incorporate a wide range of water and lipid soluble drugs; liposomes can protect encapsulated oligonucleotides in their internal compartments from metabolism and degradation (Rosoff, in “Pharmaceutical Dosage Forms,” Lieberman, Rieger and Banker (Eds.), 1988, volume 1, p. 245). Important considerations in the preparation of liposome formulations are the lipid surface charge, vesicle size and the aqueous volume of the liposomes.

[0173] A positively charged synthetic cationic lipid, N-[1-(2,3-dioleyloxy)propyl]-N,N,N-trimethylammonium chloride (DOTMA) can be used to form small liposomes that interact spontaneously with nucleic acid to form lipid-nucleic acid complexes which are capable of fusing with the negatively charged lipids of the cell membranes of tissue culture cells, resulting in delivery of oligonucleotide (see, e.g., Feigner, P. L. et al., (1987) Proc. Natl. Acad. Sci. USA 8:7413-7417, and U.S. Pat. No. 4,897,355 for a description of DOTMA and its use with DNA).

[0174] A DOTMA analogue, 1,2-bis (oleoyloxy)-3-(trimethylammonia) propane (DOTAP) can be used in combination with a phospholipid to form DNA-complexing vesicles. LIPOFECTIN™ Bethesda Research Laboratories, Gaithersburg, Md.) is an effective agent for the delivery of highly anionic nucleic acids into living tissue culture cells that comprise positively charged DOTMA liposomes which interact spontaneously with negatively charged polynucleotides to form complexes. When enough positively charged liposomes are used, the net charge on the resulting complexes is also positive. Positively charged complexes prepared in this way spontaneously attach to negatively charged cell surfaces, fuse with the plasma membrane, and efficiently deliver functional nucleic acids into, for example, tissue culture cells. Another commercially available cationic lipid, 1,2-bis(oleoyloxy)-3,3-(trimethylammonia)propane (“DOTAP”) (Boehringer Mannheim, Indianapolis, Ind.) differs from DOTMA in that the oleoyl moieties are linked by ester, rather than ether linkages.

[0175] Other reported cationic lipid compounds include those that have been conjugated to a variety of moieties including, for example, carboxyspermine which has been conjugated to one of two types of lipids and includes compounds such as 5-carboxyspermylglycine dioctaoleoylamide (“DOGS”) (TRANSFECTAM™, Promega, Madison, Wis.) and dipalmitoylphosphatidylethanolamine 5-carboxyspermyl-amide (“DPPES”) (see, e.g., U.S. Pat. No. 5,171,678).

[0176] Another cationic lipid conjugate includes derivatization of the lipid with cholesterol (“DC-Chol”) which has been formulated into liposomes in combination with DOPE (See, Gao, X. and Huang, L., (1991) Biochim. Biophys. Res. Commun. 179:280). Lipopolylysine, made by conjugating polylysine to DOPE, has been reported to be effective for transfection in the presence of serum (Zhou, X. et al., (1991) Biochim. Biophys. Acta 1065:8). For certain cell lines, these liposomes containing conjugated cationic lipids, are said to exhibit lower toxicity and provide more efficient transfection than the DOTMA-containing compositions. Other commercially available cationic lipid products include DMRIE and DMRIE-HP (Vical, La Jolla, Calif.) and Lipofectamine (DOSPA) (Life Technology, Inc., Gaithersburg, Md.). Other cationic lipids suitable for the delivery of oligonucleotides are described in WO 98/39359 and WO 96/37194.

[0177] Liposomal formulations are particularly suited for topical administration, liposomes present several advantages over other formulations. Such advantages include reduced side effects related to high systemic absorption of the administered drug, increased accumulation of the administered drug at the desired target, and the ability to administer oligonucleotide into the skin. In some implementations, liposomes are used for delivering oligonucleotide to epidermal cells and also to enhance the penetration of oligonucleotide into dermal tissues, e.g., into skin. For example, the liposomes can be applied topically. Topical delivery of drugs formulated as liposomes to the skin has been documented (see, e.g., Weiner et al., (1992) Journal of Drug Targeting, vol. 2,405-410 and du Plessis et al., (1992) Antiviral Research, 18:259-265; Mannino, R. J. and Fould-Fogerite, S., (1998) Biotechniques 6:682-690; Itani, T. et al., (1987) Gene 56:267-276; Nicolau, C. et al. (1987) Meth. Enzymol. 149:157-176; Straubinger, R. M. and Papahadjopoulos, D. (1983) Meth. Enzymol. 101:512-527; Wang, C. Y. and Huang, L., (1987) Proc. Natl. Acad. Sci. USA 84:7851-7855).

[0178] Non-ionic liposomal systems have also been examined to determine their utility in the delivery of drugs to the skin, in particular systems comprising non-ionic surfactant and cholesterol. Non-ionic liposomal formulations comprising NOVASOME I (glyceryl dilaurate/cholesterol/polyoxyethylene-10-stearyl ether) and NOVASOME II (glyceryl distearate/cholesterol/polyoxyethylene-10-stearyl ether) were used to deliver a drug into the dermis of mouse skin. Such formulations with oligonucleotides are useful for treating a dermatological disorder.

[0179] The targeting of liposomes is also possible based on, for example, organ-specificity, cell-specificity, and organelle-specificity and is known in the art. In the case of a liposomal targeted delivery system, lipid groups can be incorporated into the lipid bilayer of the liposome in order to maintain the targeting ligand in stable association with the liposomal bilayer. Various linking groups can be used for joining the lipid chains to the targeting ligand. Additional methods are known in the art and are described, for example in U.S. Patent Application Publication No. 20060058255, the linking groups of which are herein incorporated by reference.

[0180] Liposomes that include oligonucleotides can be made highly deformable. Such deformability can enable the liposomes to penetrate through pore that are smaller than the average radius of the liposome. For example, transfersomes are yet another type of liposomes, and are highly deformable lipid aggregates which are attractive candidates for drug delivery vehicles. Transfersomes can be described as lipid droplets which are so highly deformable that they are easily able to penetrate through pores which are smaller than the droplet. Transfersomes can be made by adding surface edge activators, usually surfactants, to a standard liposomal composition. Transfersomes that include oligonucleotides can be delivered, for example, subcutaneously by infection in order to deliver oligonucleotides to keratinocytes in the skin. In order to cross intact mammalian skin, lipid vesicles must pass through a series of fine pores, each with a diameter less than 50 nm, under the influence of a suitable transdermal gradient. In addition, due to the lipid properties, these transfersomes can be self-optimizing (adaptive to the shape of pores, e.g., in the skin), self-repairing, and can frequently reach their targets without fragmenting, and often self-loading. Transfersomes have been used to deliver serum albumin to the skin. The transfersome-mediated delivery of serum albumin has been shown to be as effective as subcutaneous injection of a solution containing serum albumin.

[0181] Other formulations amenable to the present disclosure are described in PCT Publication Nos. WO 2009/088891, WO 2009/132131, and WO 2008/042973, which are hereby incorporated by reference in their entirety.

[0182] Surfactants find wide application in formulations such as emulsions (including microemulsions) and liposomes. The most common way of classifying and ranking the properties of the many different types of surfactants, both natural and synthetic, is by the use of the hydrophile/lipophile balance (HLB). The nature of the hydrophilic group (also known as the “head”) provides the most useful means for categorizing the different surfactants used in formulations (Rieger, in Pharmaceutical Dosage Forms, Marcel Dekker, Inc., New York, N.Y., 1988, p. 285).

[0183] If the surfactant molecule is not ionized, it is classified as a nonionic surfactant. Nonionic surfactants find wide application in pharmaceutical and cosmetic products and are usable over a wide range of pH values. In general, their HLB values range from 2 to about 18 depending on their structure. Nonionic surfactants include nonionic esters such as ethylene glycol esters, propylene glycol esters, glyceryl esters, polyglyceryl esters, sorbitan esters, sucrose esters, and ethoxylated esters. Nonionic alkanolamides and ethers such as fatty alcohol ethoxylates, propoxylated alcohols, and ethoxylated/propoxylated block polymers are also included in this class. The polyoxyethylene surfactants are the most popular members of the nonionic surfactant class.

[0184] If the surfactant molecule carries a negative charge when it is dissolved or dispersed in water, the surfactant is classified as anionic. Anionic surfactants include carboxylates such as soaps, acyl lactylates, acyl amides of amino acids, esters of sulfuric acid such as alkyl sulfates and ethoxylated alkyl sulfates, sulfonates such as alkyl benzene sulfonates, acyl isethionates, acyl taurates and sulfosuccinates, and phosphates. The most important members of the anionic surfactant class are the alkyl sulfates and the soaps.

[0185] If the surfactant molecule carries a positive charge when it is dissolved or dispersed in water, the surfactant is classified as cationic. Cationic surfactants include quaternary ammonium salts and ethoxylated amines. The quaternary ammonium salts are the most used members of this class.

[0186] If the surfactant molecule has the ability to carry either a positive or negative charge, the surfactant is classified as amphoteric. Amphoteric surfactants include acrylic acid derivatives, substituted alkylamides, N-alkylbetaines, and phosphatides.

[0187] The use of surfactants in drug products, formulations and in emulsions has been reviewed (Rieger, in Pharmaceutical Dosage Forms, Marcel Dekker, Inc., New York, N.Y., 1988, p. 285).

[0188] The oligonucleotides for use in the methods of the disclosure can also be provided as micellar formulations. Micelles are a particular type of molecular assembly in which amphipathic molecules are arranged in a spherical structure such that all the hydrophobic portions of the molecules are directed inward, leaving the hydrophilic portions in contact with the surrounding aqueous phase. The converse arrangement exists if the environment is hydrophobic.

### Lipid Nanoparticle-Based Delivery Methods

[0189] Oligonucleotides of in the disclosure may be fully encapsulated in a lipid formulation, e.g., a lipid nanoparticle (LNP), or other nucleic acid-lipid particle. LNPs are useful for systemic applications, as they exhibit extended circulation lifetimes following intravenous (i.v.) injection and accumulate at distal sites (e.g., sites physically separated from the administration site). LNPs include “pSPLP,” which include an encapsulated condensing agent-nucleic acid complex as set forth in PCT Publication No. WO 00/03683. The particles of the present disclosure typically have a mean diameter of about 50 nm to about 150 nm, more typically about 60 nm to about 130 nm, more typically about 70 nm to about 110 nm, most typically about 70 nm to about 90 nm, and are substantially nontoxic. In addition, the nucleic acids when present in the nucleic acid-lipid particles of the present disclosure are resistant in aqueous solution to degradation with a nuclease. Nucleic acid-lipid particles and their method of preparation are disclosed in, e.g., U.S. Pat. Nos. 5,976,567; 5,981,501; 6,534,484; 6,586,410; 6,815,432; U.S. Publication No. 2010/0324120 and PCT Publication No. WO 96/40964.

[0190] Non-limiting examples of cationic lipids include N,N-dioleyl-N,N-dimethylammonium chloride (DODAC), N,N-distearyl-N,N-dimethylammonium bromide (DDAB), N—(I-(2,3-dioleoyloxy) propyl)-N,N,N-trimethylammonium chloride (DOTAP), N—(I-(2,3-dioleyloxy) propyl)-N,N,N-trimethylammonium chloride (DOTMA), N,N-dimethyl-2,3-dioleyloxy) propylamine (DODMA), 1,2-DiLinoleyloxy-N,N-dimethylaminopropane (DLinDMA), 1,2-Dilinolenyloxy-N,N-dimethylaminopropane (DLenDMA), 1,2-Dilinoleylcarbamoyloxy-3-dimethylaminopropane (DLin-C-DAP), 1,2-Dilinoleyoxy-3-(dimethylamino) acetoxypropane (DLin-DAC), 1,2-Dilinoleyoxy-3-morpholinopropane (DLin-MA), 1,2-Dilinoleoyl-3-dimethylaminopropane (DLinDAP), 1,2-Dilinoleylthio-3-dimethylaminopropane (DLin-S-DMA), 1-Linoleoyl-2-linoleyloxy-3-dimethylaminopropane (DLin-2-DMAP), 1,2-Dilinoleyloxy-3-trimethylaminopropane chloride salt (DLin-TMA.Cl), 1,2-Dilinoleoyl-3-trimethylaminopropane chloride salt (DLin-TAP.C1), 1,2-Dilinoleyloxy-3-(N-methylpiperazino) propane (DLin-MPZ), or 3-(N,N-Dilinoleylamino)-1,2-propanediol (DLinAP), 3-(N,N-Dioleylamino)-1,2-propanedio (DOAP), 1,2-Dilinoleyloxo-3-(2-N,N-dimethylamino) ethoxypropane (DLin-EG-DMA), 1,2-Dilinolenyloxy-N,N-dimethylaminopropane (DLinDMA), 2,2-Dilinoleyl-4-dimethylaminomethyl-[1,3]-dioxolane (DLin-K-DMA) or analogs thereof, (3aR,5s,6aS)—N,N-dimethyl-2,2-di((9Z, 12Z)-octadeca-9,12-dienyetetrahydro-3aH-cyclopenta[d][1,3]dioxol-5-amine (ALN100), (6Z,9Z,28Z,31Z)-heptatriaconta-6,9,28,31-tetraen-19-yl4-(dimethylamino) bu-tanoate (MC3), 1,1′-(2-(4-(2-((2-(bis(2-hydroxydodecyl)amino)ethyl)(2-hydroxydodecyl)ami-no)ethyl)piperazin-1-yeethylazanediyedidodecan-2-ol (Tech G1), or a mixture thereof. The cationic lipid can comprise, for example, from about 20 mol % to about 50 mol % or about 40 mol % of the total lipid present in the particle.

[0191] The ionizable/non-cationic lipid can be an anionic lipid or a neutral lipid including, but not limited to, distearoylphosphatidylcholine (DSPC), dioleoylphosphatidylcholine (DOPC), dipalmitoylphosphatidylcholine (DPPC), dioleoylphosphatidylglycerol (DOPG), dipalmitoylphosphatidylglycerol (DPPG), dioleoyl-phosphatidylethanolamine (DOPE), palmitoyloleoylphosphatidylcholine (POPC), palmitoyloleoylphosphatidylethanolamine (POPE), dioleoyl-phosphatidylethanolamine 4-(N-maleimidomethyl)-cyclohexane-1-carboxylate (DOPE-mal), dipalmitoyl phosphatidyl ethanolamine (DPPE), dimyristoylphosphoethanolamine (DMPE), distearoyl-phosphatidyl-ethanolamine (DSPE), 16-O-monomethyl PE, 16-O-dimethyl PE, 18-1-trans PE, 1-stearoyl-2-oleoyl-phosphatidyethanolamine (SOPE), cholesterol, or a mixture thereof. The non-cationic lipid can be, for example, from about 5 mol % to about 90 mol %, about 10 mol %, or about 60 mol % if cholesterol is included, of the total lipid present in the particle.

[0192] The conjugated lipid that inhibits aggregation of particles can be, for example, a polyethyleneglycol (PEG)-lipid including, without limitation, a PEG-diacylglycerol (DAG), a PEG-dialkyloxypropyl (DAA), a PEG-phospholipid, a PEG-ceramide (Cer), or a mixture thereof. The PEG-DAA conjugate can be, for example, a PEG-dilauryloxypropyl (C₁₂), a PEG-dimyristyloxypropyl (C₁₄), a PEG-dipalmityloxypropyl (C₁₆), or a PEG-distearyloxypropyl (C₁₈). The conjugated lipid that prevents aggregation of particles can be, for example, from 0 mol % to about 20 mol % or about 2 mol % of the total lipid present in the particle.

[0193] In some embodiments, the nucleic acid-lipid particle further includes cholesterol at, e.g., about 10 mol % to about 60 mol % or about 50 mol % of the total lipid present in the particle.

[0194] The ASO may also be deliver in a lipidoid. The synthesis of lipidoids has been extensively described and formulations containing these compounds are particularly suited for delivery of modified nucleic acid molecules or ASOs (see Mahon et al, Bioconjug Chem. 2010 21:1448-1454; Schroeder et al, J Intern Med. 2010 267:9-21; Akinc et al, Nat Biotechnol. 2008 26:561-569; Love et al, Proc Natl Acad Sci USA. 2010 107:1864-1869; Siegwart et al, Proc Natl Acad Sci USA. 2011 108:12996-3001; all of which are incorporated herein in their entireties).

[0195] Lipid compositions for RNA delivery are disclosed in WO2012170930A1, WO2013149141A1, and WO2014152211A1, each of which are hereby incorporated by reference.

### IV. Therapeutic Applications

[0196] The present disclosure provides methods for treating an ABCB11-related diseases and disorders. In some embodiments, the ABCB11-related diseases and disorders is associated with decreased ABCB11 gene expression. In some embodiments, the ABCB11-related diseases and disorders is associated with accumulation of bile acid in cells (e.g., hepatocytes).

[0197] The present disclosure provides methods for treating or preventing cholestasis in a subject in need thereof. The method includes administering an ASO provided herein or a pharmaceutical composition including an ASO provided herein to the subject. In some embodiments, the subject has or is at risk of developing a cholestatic liver disease. In some embodiments, the cholestatic liver disease is progressive familial intrahepatic cholestasis (PFIC) (e.g., PFIC type 1 (PFIC1), PFIC type 2 (PFIC2) and PFIC type 3 (PFIC3)), Alagille Syndrome (ALGS), primary sclerosing cholangitis (PSC) (e.g., pediatric PSC), neonatal sclerosing cholangitis, pediatric intrahepatic cholestasis (e.g., pediatric primary intrahepatic cholestasis or pediatric secondary intrahepatic cholestasis), benign recurrent intrahepatic cholestasis (BRIC) (e.g., BRIC type 1, BRIC type 2, BRIC type 3), total parenteral nutrition associated cholestasis, paraneoplastic cholestasis, Stauffer syndrome, drug-associated cholestasis, infection-associated cholestasis, biliary atresia, intrahepatic cholestasis of pregnancy, primary biliary cholangitis (PBC), Dubin-Johnson syndrome, post-Kasai biliary atresia, post-liver transplantation biliary atresia, post-liver transplantation cholestasis, post-liver transplantation associated liver disease, intestinal failure associated liver disease, bile acid mediated liver injury, MRP3 deficiency syndrome, or gallstone disease. In some embodiments, the subject has or is at risk of developing PFIC2.

[0198] In some embodiments, the cholestatic liver disease is characterized by one or more symptoms selected from increased serum concentration of bile acids, increased hepatic concentration of bile acids, increased serum concentration of bilirubin, hepatocellular injury, liver scarring, liver failure, hepatomegaly, jaundice, pruritis, hypercholemia, neonatal respiratory distress syndrome, cirrhosis, lung pneumonia, xanthomas, malabsorption, hepatocellular carcinoma, splenomegaly, diarrhea, hearing loss, pancreatitis, hepatocellular necrosis, giant cell formation, gastrointestinal bleeding, portal hypertension, fatigue, loss of appetite, anorexia, steatorrhea, failure to thrive, and/or renal failure.

[0199] In some embodiments, the methods described herein include administering in combination with one or more additional therapeutics. Examples of additional therapeutics include obeticholic acid (OCA), ursodeoxycholic acid (UDCA), a PPARα agonist (e.g., lofibrate, gemfibrozil, ciprofibrate, bezafibrate, and fenofibrate), a PPARδ agonist (e.g., seladelpar), a dual α, δ PPAR agonist (e.g., elafibranor), a corticosteroid (e.g., budesonide), and an apical sodium-dependent bile acid transporter inhibitor (e.g., maralixibat, volixibat, odevixibat, elobixibat, and linerixibat).

[0200] The oligonucleotide compositions described herein are useful in the methods of the disclosure and, while not bound by theory, are believed to exert their desirable effects through their ability to modulate the levels of ABCB11 protein, and/or ABCB11 mRNA, and/or the ABCB11 activity within a cell, e.g., by increasing the level of the ABCB11 protein in a cell in a subject (e.g., a mammal, a mouse, a hamster, a non-human a primate (e.g., a monkey), or a human).

[0201] Still another aspect of the present disclosure includes methods of increasing expression of ABCB11 in a cell of a subject, comprising contacting the cell with an ASO of the disclosure (or a pharmaceutical composition including the ASO), thereby treating the disease or disorder in the subject.

[0202] In yet another aspect, the disclosure provides an ASO of the disclosure (or a pharmaceutical composition including the ASO) for use as a medicament. Further, the disclosure provides for an ASO of the disclosure (or a pharmaceutical composition including the ASO) for use in therapy.

[0203] Yet another aspect of the disclosure includes methods of modulating (e.g., increasing or reducing) expression of an ABCB11 gene in a cell (e.g., in vivo, ex vivo, or in vitro) including contacting the cell with an ASO of the disclosure (or a pharmaceutical composition including the ASO), thereby increasing the expression of a ABCB11 gene in the cell. In some embodiments, the cell is a mammalian cell (e.g., a human cell such as a human hepatocyte). The methods may include contacting a cell with an ASO of the disclosure (or a pharmaceutical composition including the ASO), in an amount effective to increase expression of an ABCB11 gene in the cell, thereby increasing expression of an ABCB11 gene in the cell. In some embodiments, contacting the cell with the ASO (or a pharmaceutical composition including the ASO) modulates (e.g., increases) the amount of ABCB11 mRNA in the cell. In some embodiments, contacting the cell with the ASO (or a pharmaceutical composition including the ASO) modulates (e.g., increases) the amount of ABCB11 protein in the cell.

[0204] Contacting of a cell with an ASO may be performed in vitro, ex vivo, or in vivo. Contacting a cell in vivo with the ASO includes contacting a cell or group of cells within a subject, e.g., a human subject, with the ASO. Combinations of in vitro, ex vivo, and in vivo methods of contacting a cell are also possible. Contacting a cell may be direct or indirect, as discussed above. Furthermore, contacting a cell may be accomplished via a targeting ligand, including any ligand described herein or known in the art. In some embodiments, the targeting ligand is a carbohydrate moiety, e.g., a GalNAc3 ligand, or any other ligand that directs the oligonucleotide to a site of interest. The cell can be a liver cell (e.g., a hepatocyte).

[0205] Administration of the ASOs or pharmaceutical compositions disclosed herein to a subject can be intravenous, intraarterial, intraperitoneal, intramuscular, subcutaneous, intrapleural, intrathecal, intracavitary, by perfusion through a catheter or by direct intralesional injection. In certain embodiments, the ASO or pharmaceutical composition is administered systemically. In certain embodiments, the ASO or pharmaceutical composition is administered by a parenteral route. For example, in certain embodiments, the ASO or pharmaceutical composition is administered by intravenously (e.g., by intravenous infusion), for example, with a prefilled bag, a prefilled pen, or a prefilled syringe. In other embodiments, the ASO or pharmaceutical composition is administered locally to an organ or tissue in which an increase in the target gene expression is desirable (e.g., liver).

[0206] In some embodiments, the oligonucleotide is administered to a subject such that the oligonucleotide is delivered to a specific site within the subject. Such targeted delivery can be achieved by either systemic administration or local administration. An increase in the expression of ABCB11 may be assessed using measuring the level or change in the level of ABCB11 mRNA or ABCB11 protein in a sample (e.g., blood, tissue or liver sample) derived from a specific site within the subject. In certain embodiments, the methods include a clinically relevant increase of expression of ABCB11, e.g., as demonstrated by a clinically relevant outcome after treatment of a subject with an agent to reduce the expression of ABCB11.

[0207] In other embodiments of the methods provided herein, the oligonucleotide is administered in an amount and for a time effective to result in a reduction (e.g., by 10%, 20%, 30%, 40%, 50%, 60%, 70%, 80%, 90%, or 100%) of one or more symptoms of cholestatic liver disease provided herein.

[0208] In some embodiments of the methods provided herein, administration of an ASO of the disclosure to a subject results in a reduction in a symptom or a change in a disease-relevant laboratory measure of a cholestatic liver disease in the subject. In some embodiments, the reduction in a symptom or change in the disease-relevant laboratory measure of cholestatic liver disease comprises a reduction in serum bile acid concentration, an increase in serum concentration of 7α-hydroxy-4-cholesten-3-one (7αC4), an increase in the ratio of serum 7αC4: serum bile acid, an increase in fecal bile acid excretion, a reduction in pruritis, a reduction in serum alanine aminotransferase (ALT) concentration, or a combination thereof. In some embodiments, the reduction in the symptom or disease relevant laboratory measure is determined relevant to a baseline level, concentration, or ratio, e.g., prior to administration of the ASO to the subject or a level determined to be within a normal range as determined from a similar subject that does not have the cholestatic liver disease.

[0209] In some embodiments, administration of an ASO or a pharmaceutical composition of the disclosure to a subject results in a reduction in serum bile acid concentration (e.g., as determined using liquid chromatography tandem mass spectrometry (LC-MS/MS)). In some embodiments, the serum bile acid concentration of the subject is reduced by at least about 5%, 10%, 20%, 30%, 40%, 50%, 60%, 70%, 80%, or 90% relative to a baseline concentration.

[0210] In some embodiments, administration of an ASO or a pharmaceutical composition of the disclosure to a subject results in an increase in serum 7αC4 concentration (e.g., as determined using LC-MS/MS; see e.g., Camilleri et al. (2009) Neurogastroenterol. Motil. 21:734-e-43, incorporated herein by reference). In some embodiments, the serum 7αC4 concentration of the subject is increased by at least about 10%, 20%, 30%, 40%, 50%, 60%, 70%, 80%, 90%, 100%, 150%, 200%, 300%, 400%, 500%, 600%, 700%, 800%, 900%, 1000% relative to a baseline concentration. In some embodiments, the serum 7αC4 concentration of the subject is increased by at least about 1-fold, 2-fold, 3-fold, 4-fold, 5-fold, 6-fold, 7-fold, 8-fold, 9-fold, or 10-fold, 20-fold, 30-fold, 40-fold, 50-fold, 60-fold, 70-fold, 80-fold, 90-fold, 100-fold, 200-fold, 300-fold, 400-fold, 500-fold or more relative to a baseline concentration.

[0211] In some embodiments, administration of an ASO or a pharmaceutical composition of the disclosure to a subject results in an increase in the ratio of serum 7αC4: serum bile acid in the subject by at least about 10%, 20%, 30%, 40%, 50%, 60%, 70%, 80%, 90%, 100%, 150%, 200%, 300%, 400%, 500%, 600%, 700%, 800%, 900%, 1000% relative to a baseline ratio. In some embodiments, administration of an ASO of the disclosure to a subject results in an increased ratio of serum 7αC4: serum bile acid in the subject by at least about 1-fold, 1.5-fold, 1.75-fold, 2-fold, 2.5-fold, 3-fold, 4-fold, 5-fold, 6-fold, 7-fold, 8-fold, 9-fold, or 10-fold, 20-fold, 30-fold, 40-fold, 50-fold, 60-fold, 70-fold, 80-fold, 90-fold, 100-fold, 200-fold, 300-fold, 400-fold, 500-fold, 1000-fold, 2000-fold, 3000-fold, 4000-fold, 5000-fold, 10000-fold, or more relative to a baseline ratio.

[0212] In some embodiments, administration of an ASO or a pharmaceutical composition of the disclosure to a subject results in an increase in fecal bile acid excretion (as determined using LC-MS/MS) by at least about 10%, 20%, 30%, 40%, 50%, 60%, 70%, 80%, 90%, 100%, 150%, 200%, 300%, 400%, 500%, 600%, 700%, 800%, 900%, 1000% relative to a baseline level. In some embodiments, administration of an ASO or a pharmaceutical composition of the disclosure to a subject results in increased fecal bile acid excretion by at least about 1-fold, 2-fold, 3-fold, 4-fold, 5-fold, 6-fold, 7-fold, 8-fold, 9-fold, or 10-fold, 20-fold, 30-fold, 40-fold, 50-fold, 60-fold, 70-fold, 80-fold, 90-fold, 100-fold, or more relative to a baseline level.

[0213] In some embodiments, administration of an ASO of the disclosure to a subject results in an reduction in the severity of pruritis in the subject (e.g., as determined using an ItchRO (Observer) score, an ItchRO (Patient) score, or a combination thereof (see e.g., Kamath et al. (2018) Patient 11 (1): 69-82, incorporated herein by reference). In some embodiments, administration of an ASO of the disclosure results in a reduction in the ItchRO (Observer) score on a scale of 1 to 4 of about or of at least about 0.1, 0.2, 0.3, 0.4, 0.5, 0.6, 0.7, 0.8, 0.9, 1, 1.1, 1.2, 1.3, 1.4, 1.5, 1.6, 1.7, 1.8, 1.9, 2, 2.25, 2.5, or 3 or more relative to baseline. In some embodiments, the administration of an ASO of the disclosure results in a reduction in the ItchRO (Patient) score on a scale of 1 to 10 of about or of at least about 0.1, 0.2, 0.3, 0.4, 0.5, 1, 1.5, 2, 2.5, 3, 3.5, 4, 4.5, 5, 5.5, 6, 6.5, 7, 7.5, 8, 8.5, 9, 9.5, or 10. In some embodiments, administration of an ASO of the disclosure results in a reduction of the ItchRO (Observer) score, the ItchRO (Patient) score, or both to zero.

[0214] In some embodiments, administration of an ASO of the disclosure to a subject results in a reduction in serum alanine aminotransferase (ALT) concentration (e.g., as determined using a spectrophotometric method as described in Knight et al. (1968) J. Med. Lab Technol. 25:106-111) of at least about 1%, 2%, 3%, 4%, 5%, 6%, 7%, 8%, 9%, 10%, 11%, 12%, 13%, 14%, 15%, 16%, 17%, 18%, 19%, 20%, 25%, or 30% relative to a baseline concentration.

### Increase of ABCB11 Expression

[0215] In some aspects, the therapeutic methods disclosed herein, using an ASO that targets an ABCB11 regRNA, result in increased ABCB11 expression in a subject. Increasing the expression of an ABCB11 gene includes any level of increasing expression of a ABCB11 gene, e.g., at least partial increase of the expression of a ABCB11 gene. Increased expression may be assessed by an increase in an absolute or relative level of one or more of these variables compared with a control level. The control level may be any type of control level that is utilized in the art, e.g., a pre-dose baseline level, or a level determined from a similar subject, cell, or sample that is untreated or treated with a control (such as, e.g., buffer only (vehicle) control or inactive agent control). In certain embodiments, the method causes a clinically relevant increase of expression of ABCB11, e.g., as demonstrated by a clinically relevant outcome after treatment of a subject with an ASO provided herein to increase the expression of ABCB11.

[0216] In certain embodiments, the methods disclosed herein result in increased ABCB11 gene expression in a cell, tissue, or subject by at least about 1%, at least about 2%, at least about 5%, at least about 10%, at least about 15%, at least about 20%, at least about 25%, at least about 30%, at least about 35%, at least about 40%, at least about 45%, at least about 50%, at least about 55%, at least about 60%, at least about 65%, at least about 70%, at least about 75%, at least about 80%, at least about 85%, at least about 90%, at least about 91%, at least about 92%, at least about 93%, at least about 94%, at least about 95%, at least about 96%, at least about 97%, at least about 98%, or at least about 99%, relative to the pre-dose, pre-administration, or pre-exposure baseline level. In certain embodiments, the methods disclosed herein result in increased ABCB11 gene expression in a cell, tissue, or subject by at least 1-fold, at least 1.5-fold, at least 2-fold, at least 3-fold, at least 4-fold, at least 5-fold, at least 6-fold, at least 7-fold, at least 8-fold, at least 9-fold, or at least 10-fold or more relative to the pre-dose, pre-administration, or pre-exposure baseline level. In certain embodiments, the cell, tissue, or subject has a deficiency in ABCB11 expression, and the method disclosed herein restores the ABCB11 expression level (e.g., ABCB11 protein level or ABCB11 mRNA level) or ABCB11 protein activity to at least 20%, at least 30%, at least 40%, at least 50%, at least 60%, at least 70%, at least 80%, at least 90%, or at least 100% of the average ABCB11 expression level (e.g., ABCB11 protein level or ABCB11 mRNA level) or ABCB11 protein activity in similar cells, tissues or subjects (e.g., of the same species, of the like age, and/or of the same sex) that do not have a deficiency in ABCB11 expression.

[0217] In some embodiments, an ASO of the disclosure may enhance the production of ABCB11 mRNA (e.g., in a cell or in a cell, tissue, or sample of a subject) by at least about 1%, at least about 2%, at least about 5%, at least about 10%, at least about 15%, at least about 20%, at least about 25%, at least about 30%, at least about 35%, at least about 40%, at least about 45%, at least about 50%, at least about 55%, at least about 60%, at least about 65%, at least about 70%, at least about 75%, at least about 80%, at least about 85%, at least about 90%, at least about 91%, at least about 92%, at least about 93%, at least about 94%, at least about 95%, at least about 96%, at least about 97%, at least about 98%, or at least about 99%, at least about 100%, at least about 150%, at least about 200%, at least about 250%, at least about 300%, at least about 350%, at least about 400%, at least about 500%, at least about 600%, at least about 700%, at least about 800%, at least about 900% or more, relative to the pre-dose, pre-administration, or pre-exposure baseline level. In some embodiments, an ASO of the disclosure may enhance the production of ABCB11 mRNA (e.g., in a cell or in a cell, tissue, or sample of a subject) by at least 1-fold, at least 2-fold, at least 3-fold, at least 4-fold, at least 5-fold, at least 6-fold, at least 7-fold, at least 8-fold, at least 9-fold, or at least 10-fold or more, relative to the pre-dose, pre-administration, or pre-exposure baseline level.

[0218] In some embodiments, an ASO of the disclosure may enhance the production of ABCB11 protein (e.g., in a cell or in a cell, tissue, or sample of a subject) by at least about 1%, at least about 2%, at least about 5%, at least about 10%, at least about 15%, at least about 20%, at least about 25%, at least about 30%, at least about 35%, at least about 40%, at least about 45%, at least about 50%, at least about 55%, at least about 60%, at least about 65%, at least about 70%, at least about 75%, at least about 80%, at least about 85%, at least about 90%, at least about 91%, at least about 92%, at least about 93%, at least about 94%, at least about 95%, at least about 96%, at least about 97%, at least about 98%, or at least about 99%, at least about 100%, at least about 150%, at least about 200%, at least about 250%, at least about 300%, at least about 350%, at least about 400%, at least about 500%, at least about 600%, at least about 700%, at least about 800%, at least about 900% or more, relative to the pre-dose, pre-administration, or pre-exposure baseline level. In some embodiments, an ASO of the disclosure may enhance the production of ABCB11 protein (e.g., in a cell or in a cell, tissue, or sample of a subject) by at least 1-fold, at least 2-fold, at least 3-fold, at least 4-fold, at least 5-fold, at least 6-fold, at least 7-fold, at least 8-fold, at least 9-fold, or at least 10-fold or more, relative to the pre-dose, pre-administration, or pre-exposure baseline level.

[0219] The expression of an ABCB11 gene may be assessed based on the level of any variable associated with ABCB11 gene expression, e.g., ABCB11 mRNA level or ABCB11 protein level. In certain embodiments, the expression level or activity of ABCB11 herein refers to the average expression level or activity of ABCB11 in the liver (e.g., of a mammal or human subject).

[0220] In certain embodiments, surrogate markers can be used to detect an increase of ABCB11 expression. For example, effective treatment of a ABCB11-related disorder (e.g., a cholestatic liver disease provided herein), as demonstrated by acceptable diagnostic and monitoring criteria with an agent to increase ABCB11 expression can be understood to demonstrate a clinically relevant increase in ABCB11.

[0221] Increase of the expression of a ABCB11 gene may be manifested by an increase of the amount of mRNA expressed by a first cell or group of cells (such cells may be present, for example, in a sample derived from a subject) in which a ABCB11 gene is transcribed and which has or have been treated (e.g., by contacting the cell or cells with an oligonucleotide of the disclosure, or by administering an oligonucleotide of the disclosure to a subject in which the cells are or were present) such that the expression of a ABCB11 gene is increased, as compared to a second cell or group of cells substantially identical to the first cell or group of cells but which has not or have not been so treated (control cell(s) not treated with an oligonucleotide or not treated with an oligonucleotide targeted to the gene of interest).

[0222] In other embodiments, increase of the expression of a ABCB11 gene may be assessed in terms of an increase of a parameter that is functionally linked to ABCB11 gene expression, e.g., bile acids, ABCB11 protein expression or ABCB11 activity or as otherwise provided herein. An increase in ABCB11 expression may be determined in any cell expressing ABCB11 mRNA or protein, either endogenous or heterologous from an expression construct, and by any assay known in the art.

[0223] An increase of ABCB11 mRNA or protein expression may be manifested by an increase in the level of the ABCB11 protein that is expressed by a cell or group of cells (e.g., the level of protein expressed in a sample derived from a subject), relative to a control cell or a control group of cells. An increase of ABCB11 expression may also be manifested by an increase in the level of the ABCB11 mRNA level in a treated cell or group of cells, relative to a control cell or a control group of cells.

[0224] A control cell or group of cells that may be used to assess the increase of the expression of a ABCB11 gene includes a cell or group of cells that has not yet been contacted with an oligonucleotide of the disclosure. For example, the control cell or group of cells may be derived from an individual subject (e.g., a human or animal subject) prior to treatment of the subject with an oligonucleotide.

[0225] The level of ABCB11 mRNA that is expressed by a cell or group of cells may be determined using any method known in the art for assessing mRNA expression. In one embodiment, the level of expression of ABCB11 in a sample is determined by detecting a transcribed polynucleotide, or portion thereof, e.g., ABCB11 mRNA. RNA may be extracted from cells using RNA extraction techniques including, for example, using acid phenol/guanidine isothiocyanate extraction (RNAzol B; Biogenesis), RNEasy™ RNA preparation kits (Qiagen) or PAXgene (PreAnalytix, Switzerland). Typical assay formats utilizing ribonucleic acid hybridization include nuclear run-on assays, RT-PCR, RNase protection assays, northern blotting, in situ hybridization, and microarray analysis. Circulating ABCB11 mRNA may be detected using methods the described in PCT Publication WO 2012/177906, the entire contents of which are hereby incorporated herein by reference. In some embodiments, the level of expression of ABCB11 is determined using a nucleic acid probe. The term “probe,” as used herein, refers to any molecule that is capable of selectively binding to a specific ABCB11 sequence, e.g. to an mRNA or polypeptide. Probes can be synthesized by one of skill in the art, or derived from appropriate biological preparations. Probes may be specifically designed to be labeled. Examples of molecules that can be utilized as probes include, but are not limited to, RNA, DNA, proteins, antibodies, and organic molecules.

[0226] Isolated mRNA can be used in hybridization or amplification assays that include, but are not limited to, Southern or Northern analyses, polymerase chain reaction (PCR) analyses, and probe arrays. One method for the determination of mRNA levels involves contacting the isolated mRNA with a nucleic acid molecule (probe) that can hybridize to ABCB11 mRNA. In one embodiment, the mRNA is immobilized on a solid surface and contacted with a probe, for example by running the isolated mRNA on an agarose gel and transferring the mRNA from the gel to a membrane, such as nitrocellulose. In an alternative embodiment, the probe(s) are immobilized on a solid surface and the mRNA is contacted with the probe(s), for example, in an AFFYMETRIX gene chip array. A skilled artisan can readily adapt known mRNA detection methods for use in determining the level of ABCB11 mRNA.

[0227] An alternative method for determining the level of expression of ABCB11 in a sample involves the process of nucleic acid amplification and/or reverse transcriptase (to prepare cDNA) of for example mRNA in the sample, e.g., by RT-PCR (the experimental embodiment set forth in Mullis, 1987, U.S. Pat. No. 4,683,202), ligase chain reaction (Barany (1991) Proc. Natl. Acad. Sci. USA 88:189-193), self-sustained sequence replication (Guatelli et al. (1990) Proc. Natl. Acad. Sci. USA 87:1874-1878), transcriptional amplification system (Kwoh et al. (1989) Proc. Natl. Acad. Sci. USA 86:1173-1177), Q-Beta Replicase (Lizardi et al. (1988) Bio/Technology 6:1197), rolling circle replication (Lizardi et al., U.S. Pat. No. 5,854,033) or any other nucleic acid amplification method, followed by the detection of the amplified molecules using techniques well known to those of skill in the art. These detection schemes are especially useful for the detection of nucleic acid molecules if such molecules are present in very low numbers. In particular aspects of the disclosure, the level of expression of ABCB11 is determined by quantitative fluorogenic RT-PCR (i.e., the TaqMan™ System) or the DUAL-GLOR Luciferase assay.

[0228] The expression levels of ABCB11 mRNA may be monitored using a membrane blot (such as used in hybridization analysis such as Northern, Southern, dot, and the like), or microwells, sample tubes, gels, beads or fibers (or any solid support comprising bound nucleic acids). See U.S. Pat. Nos. 5,770,722; 5,874,219; 5,744,305; 5,677,195; and 5,445,934, which are incorporated herein by reference. The determination of ABCB11 expression levels may also comprise using nucleic acid probes in solution.

[0229] In some embodiments, the level of mRNA expression is assessed using branched DNA (bDNA) assays, quantitative PCR (qPCR), real-time quantitative PCR (RT-qPCR), multiplex qPCR or RT-qPCR, RNA-seq, or microarray analysis. Such methods can also be used for the detection of ABCB11 nucleic acids.

[0230] The level of ABCB11 protein expression may be determined using any method known in the art for the measurement of protein levels. Such methods include, for example, electrophoresis, capillary electrophoresis, high performance liquid chromatography (HPLC), thin layer chromatography (TLC), hyperdiffusion chromatography, fluid or gel precipitin reactions, absorption spectroscopy, a colorimetric assays, spectrophotometric assays, flow cytometry, FACS, immunodiffusion (single or double), immunoelectrophoresis, western blotting, radioimmunoassay (RIA), enzyme-linked immunosorbent assays (ELISAs), immunofluorescent assays, electrochemiluminescence assays, Luminex, MSD, FISH, and the like. Such assays can also be used for the detection of proteins indicative of the presence or replication of ABCB11 proteins.

### Examples

[0231] Below are examples of specific embodiments for carrying out the present disclosure. The examples are offered for illustrative purposes only, and are not intended to limit the scope of the present disclosure in any way. Efforts have been made to ensure accuracy with respect to numbers used (e.g., amounts, temperatures, etc.), but some experimental error and deviation should, of course, be allowed for.

[0232] The practice of the present disclosure will employ, unless otherwise indicated, conventional methods of protein chemistry, biochemistry, recombinant DNA techniques and pharmacology, within the skill of the art. Such techniques are explained fully in the literature. See, e.g., T. E. Creighton, Proteins: Structures and Molecular Properties (W. H. Freeman and Company, 1993); A. L. Lehninger, Biochemistry (Worth Publishers, Inc., current addition); Sambrook, et al., Molecular Cloning: A Laboratory Manual (2nd Edition, 1989); Methods In Enzymology (S. Colowick and N. Kaplan eds., Academic Press, Inc.); Remington's Pharmaceutical Sciences, 18th Edition (Easton, Pennsylvania: Mack Publishing Company, 1990); Carey and Sundberg Advanced Organic Chemistry 3^{rd} Ed. (Plenum Press) Vols A and B (1992).

### Example 1: Modulation of ABCB11 expression using regRNA-targeting ASOs

### Materials and Methods

### Aso Treatment of Primary Human Hepatocytes.

[0233] Primary human hepatocytes (PHH) were thawed using Lonza Human Cryopreserved Hepatocyte Thawing Medium and plated in 96-well collagen-coated plates (5.5-6.0×10⁴ cells per well). Four hours later, the media was replaced with sterile-filtered QualGro™ Hepatocyte Culture Medium (BioIVT) containing antibiotic supplement, 0.3 mg/ml Matrigel® matrix (Corning®), and ASO at the desired concentration (e.g., 1.25 μM, 2.5 μM, 5 μM, or 10 μM). After 72 hrs., cells were harvested by aspirating media, washing once with phosphate-buffered saline (PBS), and lysed with 150 μl of Buffer RLT lysis buffer (Qiagen®). Plates were frozen at-80° C. during cell lysis. After thawing, total RNA was isolated using the Qiagen RNEasy kit as instructed by manufacturer. cDNA (random-primed) was synthesized from 10 μl of RNA using the LifeTech High Capacity cDNA Reverse Transcription kit. 2 μl of cDNA was used for reverse transcription-quantitative PCR (RT-qPCR) analyses using standard Taqman” reagents from Applied Biosystems™ to measure ABCB11 and CYP7A1 gene expression. Gene expression data was normalized to the housekeeper gene, beta-2-microglobulin (B2M).

### In Vitro Biliary Clearance Assay

[0234] The ACCULIVER™ Human Biliary Clearance Kit (also known as the B-CLEAR® assay; BioIVT) was used to assess bile acid efflux in PHHs after ASO treatment. On Day 0, 4×10⁵ cells were plated in 24-well collagen-coated plates and QualGro medium containing 0.3% Matrigel matrix and ASO was added 4 hrs. later. On Day 2, medium was refreshed. On Day 3, cells from some wells were harvested for RNA analysis using 350 μl Buffer RLT lysis buffer, and lysates frozen at −80° C. for later RNA extraction. On Day 4, cells in the remaining wells had medium refreshed. On Day 6, the assay was performed according to the manufacturer's instructions. Briefly, cells were conditioned with Plus or Minus Buffers provided with the assay for 10 minutes, followed by addition of deuterium-labelled sodium taurocholate (d8-TCA) for 10 mins. Cells were washed 3 times, and frozen after the final wash. Analysis of d8-TCA was performed using liquid chromatography-mass spectrometry (LC-MS) (BioIVT). Calculations of bile acid clearance were made from the resulting LC-MS data according to the manufacturer's instructions.

### Results

1. Synthesis and In Vitro Characterization of Human ABCB11 regRNA-Targeting ASOs

[0235] Four human ABCB11 regRNAs were identified in the human genome (referred to herein as RR62 v2, RR63 v1, RR64 v2, and RR74 v1). An extended version of RR63 (referred to herein as RR63 v2) was also identified. FIG. 1C provides a diagram of the identified regRNAs aligned with the ABCB11 gene and active transcription sites.

[0236] To assess the ability of ASOs targeting ABCB11 regRNAs to modulate the expression of human ABCB11, 195 ASOs targeting the human ABCB11 regRNAs were synthesized. These initial ASOs were screened in PHHs at 5 μM to determine their efficacy in increasing human ABCB11 mRNA using quantitative PCR. This initial screen identified 10 ASOs that induced increased expression of ABCB11 mRNA by more than 1.5-fold (as compared to untreated PHHs).

[0237] ASOs that showed efficacy were selected for basewalking and tiling around their targeted regRNA hit areas. 254 additional ASOs synthesized from the basewalking and tiling of the identified ASOs. Of these, 26 ASOs were selected for chemistry fine tuning by altering the chemistry, type, and position of chemical modification of the selected ASOs. ASO sequences and chemistries are provided in Tables 2, 3, 4, 5, 6, 7, 8, 9, 10, and 11, and FIGS. 11 and 13. ABCB11 mRNA fold change (FC) and standard deviation (SD) after treatment with the ASO, normalized to untreated PHHs (UNT), is provided in Table 12. In particular, ASOs CO-3974, CO-3984, CO-3986, and CO-3998 showed an approximately 1.5-fold upregulation of ABCB11 mRNA in PHHs on Day 3. Each of these ASOs targets the paRNA regRNA RR63.

TABLE 12
ASO sequences and ABCB11 mRNA fold change.

| | FC | | | FC | | | FC | | | FC | |
|---|---|---|---|---|---|---|---|---|---|---|---|
| | mRNA | | | mRNA | | | mRNA | | | mRNA | |
| | (5 μM | | | (5 μM | | | (5 μM | | | (5 μM | |
| | ASO | | | ASO | | | ASO | | | ASO | |
| | vs. | | | vs. | | | vs. | | | vs. | |
| Name | UNT) | SD | Name | UNT) | SD | Name | UNT) | SD | Name | UNT) | SD |
| CO-4480 | 0.931 | 0.23 | CO-4026 | 1.234 | 0.43 | CO-6990 | 1.16 | 0.14 | CO-7090 | 1.203 | 0.16 |
| CO-4481 | 1.18 | 0.16 | CO-4019 | 1.028 | 0.22 | CO-6991 | 1.193 | 0.21 | CO-7091 | 1.164 | 0.04 |
| CO-4482 | 1.001 | 0.24 | CO-4022 | 1.168 | 0.29 | CO-6992 | 0.992 | 0.14 | CO-7093 | 1.269 | 0.09 |
| CO-4483 | 1.041 | 0.16 | CO-4027 | 1.095 | 0.43 | CO-6993 | 1.209 | 0.17 | CO-7094 | 0.993 | 0.08 |
| CO-4484 | 1.113 | 0.06 | CO-4034 | 0.792 | 0.1 | CO-6994 | 1.131 | 0.19 | CO-7095 | 0.925 | 0.45 |
| CO-4485 | 1.194 | 0.24 | CO-4038 | 1.701 | 0.52 | CO-6995 | 1.277 | 0.09 | CO-7096 | 1.157 | 0.12 |
| CO-4486 | 1.151 | 0.27 | CO-4036 | 1.235 | 0.69 | CO-6996 | 1.314 | 0.21 | CO-7097 | 1.028 | 0.07 |
| CO-4487 | 1.052 | 0.18 | CO-4033 | 1.472 | 0.22 | CO-6997 | 1.058 | 0.11 | CO-7098 | 1.04 | 0.17 |
| CO-4488 | 1.084 | 0.15 | CO-4030 | 1.106 | 0.24 | CO-6998 | 1.246 | 0.07 | CO-7099 | 0.882 | 0.05 |
| CO-4489 | 1.083 | 0.24 | CO-4037 | 0.697 | 0.12 | CO-6999 | 1.24 | 0.09 | CO-7100 | 1.406 | 0.64 |
| CO-4490 | 1.158 | 0.18 | CO-4039 | 1.022 | 0.34 | CO-7000 | 1.203 | 0.09 | CO-7101 | 1.165 | 0.06 |
| CO-4491 | 1.101 | 0.09 | CO-4035 | 0.926 | 0.41 | CO-7001 | 1.237 | 0.14 | CO-7102 | 1.068 | 0.07 |
| CO-4492 | 1.192 | 0.14 | CO-4046 | 1.035 | 0.12 | CO-7002 | 1.367 | 0.17 | CO-7103 | 1.006 | 0.2 |
| CO-4493 | 1.178 | 0.17 | CO-4047 | 0.676 | 0.14 | CO-7003 | 1.066 | 0.07 | CO-7104 | 0.918 | 0.13 |
| CO-4494 | 1.12 | 0.19 | CO-4049 | 0.889 | 0.19 | CO-7004 | 1.285 | 0.1 | CO-7105 | 1.002 | 0.12 |
| CO-4495 | 1.07 | 0.14 | CO-4041 | 0.963 | 0.2 | CO-7005 | 1.257 | 0.18 | CO-7106 | 1.246 | 0.17 |
| CO-4496 | 0.984 | 0.15 | CO-4048 | 1.448 | 0.28 | CO-7006 | 1.279 | 0.18 | CO-7107 | 1.148 | 0.18 |
| CO-4497 | 1.024 | 0.13 | CO-4043 | 1.934 | 0.21 | CO-7007 | 0.963 | 0.12 | CO-7108 | 1.101 | 0.24 |
| CO-4498 | 0.934 | 0.15 | CO-4050 | 0.968 | 0.11 | CO-7008 | 1.175 | 0.13 | CO-7109 | 1.043 | 0.17 |
| CO-4499 | 1.202 | 0.34 | CO-4044 | 0.974 | 0.22 | CO-7009 | 1.289 | 0.11 | CO-7110 | 1.035 | 0.06 |
| CO-4500 | 1.109 | 0.2 | CO-4042 | 0.605 | 0.1 | CO-7010 | 1.293 | 0.19 | CO-7111 | 1.027 | 0.12 |
| CO-4501 | 1.023 | 0.04 | CO-4057 | 1.245 | 0.09 | CO-7011 | 1.284 | 0.09 | CO-7112 | 0.98 | 0.09 |
| CO-4502 | 1.142 | 0.14 | CO-4054 | 1.269 | 0.32 | CO-7012 | 0.985 | 0.11 | CO-7113 | 1.179 | 0.22 |
| CO-4503 | 1.202 | 0.14 | CO-4058 | 1.134 | 0.26 | CO-7013 | 0.997 | 0.11 | CO-7114 | 1.47 | 0.09 |
| CO-4504 | 1.232 | 0.32 | CO-4060 | 1.117 | 0.15 | CO-7014 | 1.293 | 0.08 | CO-7147 | 1.272 | 0.14 |
| CO-4505 | 1.011 | 0.07 | CO-4052 | 1.054 | 0.07 | CO-7015 | 1.257 | 0.29 | CO-7148 | 1.527 | 0.1 |
| CO-4506 | 1.169 | 0.18 | CO-4056 | 1.115 | 0.17 | CO-7016 | 1.278 | 0.12 | CO-7149 | 1.719 | 0.28 |
| CO-4507 | 0.992 | 0.13 | CO-4055 | 1.287 | 0.37 | CO-7017 | 1.182 | 0.23 | CO-7150 | 1.505 | 0.17 |
| CO-4508 | 1.185 | 0.14 | CO-4059 | 1.186 | 0.13 | CO-7018 | 1.249 | 0.42 | CO-7151 | 1.498 | 0.18 |
| CO-4509 | 1.233 | 0.09 | CO-3974 | 1.2 | 0.33 | CO-7019 | 1.284 | 0.31 | CO-7152 | 1.28 | 0.11 |
| CO-4510 | 1.084 | 0.24 | CO-3986 | 1.27 | 0.23 | CO-7020 | 1.133 | 0.1 | CO-7153 | 1.409 | 0.09 |
| CO-4511 | 1.182 | 0.08 | CO-3996 | 2.097 | 0.76 | CO-7022 | 1.224 | 0.13 | CO-7154 | 1.274 | 0.13 |
| CO-4512 | 1.087 | 0.1 | CO-4018 | 1.124 | 0.22 | CO-7023 | 1.338 | 0.11 | CO-7155 | 1.253 | 0.11 |
| CO-4513 | 1.122 | 0.41 | CO-4020 | 1.201 | 0.19 | CO-7024 | 1.415 | 0.57 | CO-7157 | 1.195 | 0.03 |
| CO-4514 | 1.175 | 0.16 | CO-4062 | 1.108 | 0.08 | CO-7025 | 1.259 | 0.19 | CO-7158 | 1.229 | 0.06 |
| CO-4515 | 0.978 | 0.24 | CO-4051 | 0.908 | 0.1 | CO-7026 | 1.158 | 0.11 | CO-7159 | 1.326 | 0.07 |
| CO-4516 | 1.033 | 0.1 | CO-4053 | 1.218 | 0.08 | CO-7027 | 1.304 | 0.29 | CO-7160 | 1.312 | 0.07 |
| CO-4517 | 0.914 | 0.07 | CO-4040 | 0.921 | 0.39 | CO-7028 | 1.49 | 0.28 | CO-7161 | 1.324 | 0.08 |
| CO-4518 | 0.981 | 0.07 | CO-4007 | 1.276 | 0.28 | CO-7030 | 1.372 | 0.3 | CO-7163 | 1.308 | 0.11 |
| CO-4519 | 1.061 | 0.18 | CO-4031 | 1.427 | 0.2 | CO-7031 | 1.212 | 0.05 | CO-7164 | 1.178 | 0.12 |
| CO-4520 | 0.945 | 0.13 | CO-4025 | 0.832 | 0.24 | CO-7032 | 1.093 | 0.08 | CO-7165 | 1.329 | 0.09 |
| CO-4521 | 1.092 | 0.16 | CO-4045 | 0.815 | 0.09 | CO-7033 | 1.316 | 0.1 | CO-7166 | 1.517 | 0.22 |
| CO-4522 | 1.027 | 0.11 | CO-3988 | 1.827 | 0.63 | CO-7034 | 1.097 | 0.27 | CO-7167 | 1.403 | 0.26 |
| CO-4523 | 1.037 | 0.21 | CO-4000 | 1.533 | 0.57 | CO-7035 | 1.047 | 0.09 | CO-7168 | 1.301 | 0.17 |
| CO-4524 | 1.243 | 0.11 | CO-4032 | 1.311 | 0.3 | CO-7036 | 1.129 | 0.17 | CO-7169 | 1.289 | 0.19 |
| CO-4525 | 0.995 | 0.12 | CO-4029 | 0.908 | 0.24 | CO-7037 | 1.136 | 0.28 | CO-7170 | 1.477 | 0.22 |
| CO-4526 | 1.048 | 0.09 | CO-4061 | 1.233 | 0.25 | CO-7038 | 1.189 | 0.25 | CO-7171 | 1.46 | 0.35 |
| CO-4527 | 0.97 | 0.09 | CO-4010 | 0.898 | 0.23 | CO-7040 | 1.267 | 0.29 | CO-7177 | 1.455 | 0.11 |
| CO-4528 | 0.883 | 0.14 | CO-4063 | 1.457 | 0.29 | CO-7041 | 1.15 | 0.18 | CO-7178 | 1.737 | 0.32 |
| CO-4529 | 1.05 | 0.1 | CO-6669 | 1.291 | 0.15 | CO-7042 | 1.132 | 0.09 | CO-7179 | 2.344 | 0.38 |
| CO-3984 | 1.111 | 0.13 | CO-6670 | 1.157 | 0.13 | CO-7043 | 1.1 | 0.13 | CO-7180 | 2.04 | 0.56 |
| CO-3989 | 1.19 | 0.36 | CO-6671 | 1.163 | 0.02 | CO-7044 | 0.943 | 0.06 | CO-7181 | 1.603 | 0.11 |
| CO-3994 | 1.988 | 0.53 | CO-6672 | 1.391 | 0.11 | CO-7045 | 1.112 | 0.23 | CO-7182 | 1.572 | 0.25 |
| CO-3993 | 1 | 0.29 | CO-6673 | 1.313 | 0.11 | CO-7046 | 1.243 | 0.19 | CO-7183 | 1.295 | 0.07 |
| CO-3995 | 1.683 | 0.15 | CO-6674 | 1.175 | 0.08 | CO-7047 | 1.175 | 0.13 | CO-7184 | 1.582 | 0.3 |
| CO-3991 | 1.614 | 0.34 | CO-6675 | 1.346 | 0.16 | CO-7048 | 1.175 | 0.17 | CO-7185 | 1.327 | 0.14 |
| CO-3992 | 1.388 | 0.28 | CO-6676 | 1.204 | 0.13 | CO-7050 | 1.026 | 0.16 | CO-7186 | 1.85 | 0.25 |
| CO-3999 | 1.076 | 0.09 | CO-6966 | 1.177 | 0.08 | CO-7051 | 1.201 | 0.21 | CO-7187 | 1.544 | 0.29 |
| CO-4006 | 1.044 | 0.13 | CO-6967 | 1.405 | 0.4 | CO-7052 | 1.046 | 0.09 | CO-7188 | 1.697 | 0.2 |
| CO-4003 | 1.181 | 0.3 | CO-6968 | 1.373 | 0.16 | CO-7053 | 1.145 | 0.25 | CO-7189 | 1.487 | 0.07 |
| CO-3998 | 1.319 | 0.11 | CO-6969 | 1.266 | 0.18 | CO-7054 | 1.323 | 0.18 | CO-7190 | 1.641 | 0.24 |
| CO-4005 | 0.913 | 0.18 | CO-6971 | 1.091 | 0.17 | CO-7055 | 1.498 | 0.28 | CO-7191 | 1.676 | 0.38 |
| CO-3997 | 1.501 | 0.38 | CO-6972 | 1.207 | 0.14 | CO-7056 | 1.491 | 0.53 | CO-7192 | 1.591 | 0.37 |
| CO-4001 | 2.08 | 0.31 | CO-6973 | 1.325 | 0.24 | CO-7057 | 1.145 | 0.15 | CO-7193 | 1.555 | 0.2 |
| CO-4002 | 1.831 | 0.64 | CO-6974 | 1.394 | 0.14 | CO-7058 | 1.052 | 0.08 | CO-7195 | 1.443 | 0.12 |
| CO-4004 | 1.103 | 0.11 | CO-6975 | 1.34 | 0.14 | CO-7059 | 1.023 | 0.09 | CO-7196 | 1.33 | 0.03 |
| CO-4013 | 1.166 | 0.11 | CO-6976 | 1.373 | 0.16 | CO-7060 | 1.17 | 0.24 | CO-7197 | 1.364 | 0.24 |
| CO-4017 | 1.228 | 0.11 | CO-6977 | 1.15 | 0.14 | CO-7061 | 1.261 | 0.24 | CO-7198 | 1.075 | 0.1 |
| CO-4008 | 1.1 | 0.14 | CO-6978 | 1.456 | 0.19 | CO-7062 | 1.218 | 0.18 | CO-7199 | 1.166 | 0.1 |
| CO-4014 | 1.003 | 0.12 | CO-6979 | 1.201 | 0.18 | CO-7063 | 1.291 | 0.22 | CO-7200 | 1.277 | 0.06 |
| CO-4016 | 1.294 | 0.25 | CO-6985 | 1.414 | 0.15 | CO-7064 | 1.017 | 0.1 | CO-7201 | 1.253 | 0.17 |
| CO-4015 | 1.043 | 0.23 | CO-6986 | 0.998 | 0.04 | CO-7065 | 1.262 | 0.13 | CO-7205 | 1.278 | 0.21 |
| CO-4011 | 1.184 | 0.14 | CO-6987 | 1.026 | 0.23 | CO-7066 | 1.2 | 0.11 | CO-7206 | 1.164 | 0.15 |
| CO-4009 | 1.011 | 0.09 | CO-6988 | 1.093 | 0.07 | CO-7067 | 1.081 | 0.13 | CO-7207 | 1.221 | 0.08 |
| CO-4012 | 1.15 | 0.15 | CO-6989 | 1.469 | 0.31 | CO-7068 | 1.077 | 0.23 | CO-7208 | 1.339 | 0.06 |
| CO-4024 | 0.997 | 0.26 | CO-6981 | 1.164 | 0.04 | CO-7069 | 1.011 | 0.11 | CO-7209 | 1.262 | 0.2 |
| CO-4023 | 1.092 | 0.47 | CO-6982 | 0.976 | 0.11 | CO-7070 | 1.044 | 0.14 | CO-7210 | 1.362 | 0.26 |
| CO-4028 | 1.418 | 0.44 | CO-6983 | 1.065 | 0.14 | CO-7088 | 1.177 | 0.21 | | | |
| CO-4021 | 1.301 | 0.33 | CO-6984 | 1.127 | 0.08 | CO-7089 | 1.249 | 0.16 | | | |

[0238] ASOs CO-3986 and CO-4529 were selected for further characterization in dose titration studies in PHHs and were tested at 2.5 M, 5 μM, and 10 μM. Both ASO CO-3986 (targeting paRNA RR63) and CO-4529 (targeting eRNA RR64) induced a dose-dependent increase in ABCB11 mRNA (FIG. 2A). In addition, ASOs CO-4535 (targeting eRNA RR64) and CO-4556 (targeting eRNA RR74) also induced a dose-dependent increase in ABCB11 mRNA in PHHs (FIG. 2B). Each of ASOs CO-3986, CO-4529, CO-4535, and CO-4556 targets a different ABCB11 regRNA, suggesting that all four regRNAs have a role in regulating ABCB11 gene expression.

[0239] Additional chemical modifications were made to ASOs CO-4535 (i.e., CO-7166, CO-7172, CO-7186, CO-7187, CO-7188, CO-7189, CO-7190, CO-7191, CO-7193, and CO-7194), CO-4529 (i.e., CO-7175, CO-7178, CO-7179, CO-7180, CO-7181, CO-7182, and CO-7184), CO-4517 (i.e., CO-7141, CO-7148, CO-7149, CO7150, and CO-7151), and CO-3986 (i.e., CO-7081 and CO-7082). These ASOs were tested for their ability to induce increased expression of human ABCB11 in PHHs as described above. As shown in FIG. 4, treatment of PHHs with these ASOs resulted in upregulated human ABCB11 expression greater than or equal to 1.5-fold as compared to untreated PHHs (FIG. 4). Visual representations of the chemical modifications are provided in FIGS. 11 and 13.

[0240] Moreover, a dose-responsive increase in ABCB11 mRNA expression was also observed with ASOs targeting a downstream regRNA from enhancer RR62_v2 (CO-4513), as well as upstream regRNAs from enhancers RR64_v2 (CO-4535) and RR74_v1 (CO-4556) (FIG. 5). Obeticholic acid (OCA), the second-line treatment for PBC, was used as a positive control for ABCB11 upregulation at doses of 0.3 μM and 3 μM. ASO CO-3760, a gapmer targeting ABCB11 mRNA to knock down ABCB11, was used as an uptake control at a concentration of 5 μM ABCB11 and CYP7A1 mRNA expression on Day 4 after ASO treatment is shown.

[0241] To further assess the ability of ASO CO-4535 to upregulate the expression of ABCB11 and CYP7A1 mRNA, a time course assay was performed over 7 days in PHHs contacted with ASO CO-4535. Cells were treated with CO-4535 for two days, and were collected daily from Day 2 to Day 7. As shown in FIG. 6, on Day 4, PHHs contacted with ASO CO-4535 showed strong ABCB11 and CYP7A1 mRNA upregulation, indicating effective bile acid efflux (FIG. 6). Increasing ABCB11 expression promotes clearance of intracellular bile acids (BA), which reduces the expression of the gene encoding Small Heterodimer Partner (SHP), which in turn increases CYP7A1 expression.

[0242] ASOs based on CO-3986, CO-7179, CP-7180, CO-7184, and CO-4513, and containing PO-modifications as shown in Table 13 below were synthesized and screened in PHHs at 5 μM to determine their efficacy in increasing human ABCB11 mRNA expression. Moreover, ASOs having efficacy in this screen were tested for dose-dependent efficacy at 1.25 μM, 2.5 μM, 5 μM, and 10 μM in PHHs. Changes to ABCB11 mRNA levels (fold change (FC) and standard deviation (SD)) following ASO treatment (normalized to untreated hepatocytes) is provided in Table 13 below.

TABLE 13

| Name | FC mRNA (5 μM ASO vs. untreated) | SD |
|---|---|---|
| CO-11198 | 0.97 | 0.19 |
| CO-11199 | 0.97 | 0.22 |
| CO-11200 | 1.34 | 0.38 |
| CO-11201 | 0.99 | 0.13 |
| CO-11202 | 1.50 | 0.62 |
| CO-11203 | 1.38 | 0.36 |
| CO-11204 | 1.15 | 0.32 |
| CO-11205 | 1.11 | 0.45 |
| CO-11206 | 1.02 | 0.40 |
| CO-11207 | 0.91 | 0.23 |
| CO-11208 | 1.04 | 0.26 |
| CO-11209 | 1.11 | 0.21 |
| CO-11210 | 2.79 | 0.97 |
| CO-11211 | 2.80 | 0.82 |
| CO-11212 | 2.44 | 0.61 |
| CO-11213 | 1.95 | 0.53 |
| CO-11214 | 2.90 | 1.01 |
| CO-11215 | 2.68 | 0.35 |
| CO-11216 | 2.58 | 0.55 |
| CO-11217 | 2.10 | 0.39 |
| CO-11218 | 2.86 | 0.71 |
| CO-11219 | 2.45 | 0.54 |
| CO-11220 | 2.22 | 0.49 |
| CO-11221 | 2.00 | 0.68 |
| CO-11222 | 1.79 | 0.51 |
| CO-11223 | 1.80 | 0.47 |
| CO-11224 | 1.88 | 0.50 |
| CO-11225 | 1.66 | 0.30 |
| CO-11226 | 2.31 | 0.60 |
| CO-11227 | 2.11 | 0.64 |
| CO-11228 | 1.99 | 0.77 |
| CO-11229 | 2.83 | 1.05 |
| CO-11230 | 1.63 | 0.49 |
| CO-11231 | 1.85 | 0.15 |
| CO-11232 | 1.72 | 0.32 |
| CO-11233 | 1.60 | 0.22 |
| CO-11234 | 1.55 | 0.45 |
| CO-11235 | 1.47 | 0.49 |
| CO-11236 | 1.60 | 0.44 |
| CO-11237 | 1.56 | 0.36 |
| CO-11238 | 1.26 | 0.25 |
| CO-11239 | 1.53 | 0.15 |
| CO-11240 | 1.31 | 0.21 |
| CO-11241 | 1.71 | 0.39 |
| CO-11242 | 1.49 | 0.53 |
| CO-11243 | 1.71 | 0.40 |
| CO-11244 | 1.29 | 0.56 |
| CO-11245 | 1.59 | 0.46 |
| CO-12745 | 0.92 | 0.09 |
| CO-12746 | 1.09 | 0.09 |
| CO-12747 | 0.97 | 0.11 |
| CO-12748 | 0.91 | 0.10 |
| CO-12749 | 0.95 | 0.04 |
| CO-12750 | 1.39 | 0.14 |
| CO-12751 | 0.93 | 0.08 |
| CO-12752 | 0.99 | 0.08 |
| CO-12753 | 1.03 | 0.14 |
| CO-12754 | 1.04 | 0.11 |
| CO-12755 | 0.99 | 0.18 |
| CO-12756 | 1.33 | 0.01 |

[0243] As shown in Table 13, the screen identified several ASOs that upregulate ABCB11 gene expression by at least 1.5-fold. One of the ASOs identified in the screen above was CO-11202. A study to compare the effect of CO-11202 on ABCB11 mRNA expression with obeticholic acid (OCA), an FXR agonist, and the PPARa agonists elafibranor and fenofibrate was performed using PHHs. As shown in FIG. 14, CO-11202 induced a dose-dependent increase in ABCB11 mRNA expression following treatment, with about a 2-fold change observed at the 5 μM dose and about a 3.5-fold change observed at 10 μM dose.

[0244] ASOs targeting ABCB11 regRNA enhance bile acid efflux in vitro. Levels of cholesterol 7 alpha-hydroxylase (CYP7A1) mRNA (or the enzymatic activity of its protein) can be used to track changes in bile acid synthesis in the liver since the CYP7A1 protein is the first and rate-limiting step in the conversion of cholesterol to bile acids (see, e.g., Chiang and Ferrel (2020) Liver Res. 4 (2): 47-63). As bile acid levels in hepatocytes decline, Cyp7a1 is transcriptionally upregulated to restore bile acid synthesis. Conversely, when bile acid levels reach high levels, this gene is actively down regulated. These changes are mediated by farnesoid X receptor (FXR), a sensor of bile acid levels, and the master regulator of intracellular bile acid concentrations. CYP7A1 mRNA can therefore be used as a surrogate for monitoring changes in hepatic bile acids in response to ASO treatment. Accordingly, an ASO that successfully increases ABCB11 expression would be expected to promote increased bile acid efflux, thus reducing bile acid levels in the cell. In a wild-type (non-disease) setting, this reduction promotes a compensatory increase in CYP7A1 to restore normal levels.

[0245] As shown in FIG. 3, ABCB11-upregulating ASOs CO-3986, CO-4535 and CO-4556 also induce increased expression of CYP7A1 mRNA in a dose-dependent manner, indicating that these ASOs are effectively enhancing bile acid efflux. Moreover, ASOs that increased ABCB11 and CYP7A1 mRNA were effective in PHHs from multiple human donors (data not shown).

[0246] The ability of ASO CO-3986 to induce increased bile acid efflux was assessed in PHHs using the in vitro biliary clearance assay (B-CLEAR), as described above. As shown in FIG. 7, treatment with ASO CO-3986 increased ABCB11 expression (measured in duplicate wells by qRT-PCR) in a dose-responsive manner and the efflux of bile acids from the intracellular compartment to the bile cannuliculi of PHHs. CYP7A1 was also upregulated as a compensatory response to decreased intracellular bile acid levels. Moreover, treatment of PHHs with 5 μM and 10 μM of ASO CO-3986 reduced intracellular and extracellular bile acid levels in hepatocytes.

### Example 2: In Vivo Characterization of Human and Mouse ASOs

### Materials and Methods

### Aso Treatment of Mouse Primary Hepatocytes (MPH)

[0247] MPHs were isolated from C57Bl/6 mice and seeded at 2×10⁴ cells/well in a collagen-coated 96-well plate. Cells were treated with ASOs at a concentration of 5 μM in Cellartis® Power™ Primary HEP Media (Takara Bio) 24 hours after seeding. Cells were harvested 48 hours post ASO treatment by washing once with PBS, followed by collection in 100 μL of Buffer RLT lysis buffer (Qiagen).

### Liver Humanized Mice

[0248] In a first in vivo study, female liver-humanized FRG® (Fah^{-/-}; Rag2^{-/-}; Il2rg^{-/-}) knockout mice (Yecuris™) were used to assess the efficacy of the human ABCB11 regRNA-targeting ASOs CO-3986 and CO-4535 in the context of cholestasis. The mice were grouped evenly based on albumin and body weight.

[0249] A. First Study. Two groups of five mice were dosed with GalNAc3—CO-7378 (CO-3986 conjugated to GalNAc3) or GalNAc3—CO-7379 (GalNAc3 conjugated to GalNAc3) respectively, control via subcutaneous (SC) injection on Days 0 and 7. One group of five mice was dosed with PBS control via SC injection on Days 0 and 7. A fourth group of five mice was treated with ursodeoxycholic acid (UDCA) via intraperitoneal (IP) injection on Days 14-21. After fasting overnight (6 pm-9 am) the animals had a blood draw of 100 μL processed to serum on Days 0, 7, and 14 (all pre-dose). On Day 21, the animals were euthanized for terminal harvest after fasting overnight and >350 μL of whole blood was processed to serum. 100 μL of whole blood was collected in the same manner as the previous bleeds, prior to euthanasia and final exsanguination. Harvested livers were perfused with cold PBS with the left lobe and remnant liver frozen separately after bile salt collection. A piece of the ileum tissue was removed and flushed with PBS and snap-frozen. The serum (two tubes for each animal, 15 μL and 25 μL, for each timepoint) was analyzed using LC-MS (Creative Proteomics) to assess bile acids and 7αC4 levels. The remaining samples collected were analyzed for total serum bile acid levels using a commercial kit.

[0250] B. Second Study. In a second in vivo study was conducted to assess the ability of CO-11202 (CO-12367 conjugated with GalNAc3). Mice were dosed with 10 mg/CO-12367 on Days 0 and 7 via SC injection. One group of five mice were dosed with PBS control via SC injection on Days 0 and 7. One group of five mice received 10 mg/kg of obeticholic acid (OCA) via oral gavage daily for 21 days. Fasting blood was collected from the mice on Days 0, 7, 14 and 21 (collection performed prior to any SC injections) and processed to serum to analyze bile acid levels. On Day 21, mice were euthanized and livers and ileum tissue harvested and processed as described above.

[0251] Frozen liver pieces were pulverized on dry ice and RNA extracted using TRIzol™ reagent. cDNA was generated and analyzed using qPCR to detect ABCB11 mRNA levels and other genes of interest as described above. Serum 7αC4 levels were detected using LC-MS (Creative Proteomics). Total serum bile acids were measured using the Total Bile Acid Fluorometric Assay Kit (Cell BioLabs). Liver bile acids were measured using the Total Bile Acid Fluorometric Assay Kit.

### Anit Mouse Study

[0252] A study to assess the ability of mouse-specific ASOs targeting murine ABCB11 regRNA RR54 v2, CO-4758 and CO-4765, both conjugated to GalNAc, to upregulate murine Abcb11 expression in an induced-cholestasis model was performed. Male C57Bl/6 mice were divided into 7 groups of 6 animals and dosed SC with ASO on Day 0 and Day 5, followed by sacrifice on Day 10. One group of mice received UDCA (ursodeoxycholic acid, the first-line treatment for PBC) via IP injection at a dose of 30 mg/kg on Days 0-10 as a positive control. Four groups of mice were treated with alpha-naphthylisothiocyanate (ANIT) to induce chemically induce cholestasis. The ANIT-treated mice were dosed on Day 8 with 75 mg/kg of ANIT by oral gavage, and three groups of mice were mock-treated with olive oil (the vehicle used to dissolve ANIT, used as a control for the non-ANIT treated groups). Fasting serum was collected prior to the start of the study, as well as on Days 5 and 10. Serum was used to assess total bile acid and liver enzyme levels at Idexx Bioanalytics (Columbia, MO) using LC-MS. Liver bile acids were measured using the Total Bile Acid Fluorometric Assay Kit. Total RNA was also extracted from liver to measure Abcb11 and Cyp7a1 mRNA, as described above.

### Results

Asos Targeting Mouse Abcb11 regRNA Induce Increased Abcb11 Gene Expression

[0253] A mouse Abcb11 regRNA was identified. ASOs targeting this regRNA (i.e., CO-4755, CO-4765 and CO-4758) were synthesized and characterized as previously described for the ASOs targeting the human ABCB11 regRNAs using MPHs. Table 14 and FIG. 8 provide mRNA fold change (FC) and standard deviation (SD) induced by the ASOs when tested at 1 μM, 3 μM, or 9 μM, as indicated.

TABLE 14
Mouse regRNA ASOs

| | FC | SD |
|---|---|---|
| sNTC3 0 μM | 1.012 | 0.173 |
| sNTC3 3M | 1.469 | 0.113 |
| CO-4755 0 μM | 1.012 | 0.173 |
| CO-4755 1 μM | 1.796 | 0.212 |
| CO-4755 3 μM | 1.895 | 0.447 |
| CO-4755 9 μM | 1.775 | 0.409 |
| CO-4765 0 μM | 1.012 | 0.173 |
| CO-4765 1 μM | 1.812 | 0.418 |
| CO-4765 3 μM | 1.697 | 0.199 |
| CO-4765 9 μM | 1.755 | 0.627 |
| CO-4758 0 μM | 1.012 | 0.173 |
| CO-4758 1 μM | 2.164 | 0.32 |
| CO-4758 3 μM | 1.643 | 0.36 |
| CO-4758 9 μM | 1.517 | 0.371 |

[0254] Overall, these studies demonstrate that the mouse Abcb11 gene expression is regulated by a regRNA which can be targeted with an ASO to increase Abcb11 mRNA levels.

[0255] Additional chemical modifications were made to CO-4758 (i.e., CO-7212, CO-7214, CO-7215, CO-7216, CO-7237, CO-7238, and CO-7242) and CO-4765 (i.e., CO-7219, CO-7221, and CO-7227). These ASOs were tested in MPHs to assess their efficacy in upregulating the expression of the murine Abcb11 gene. Each of the tested ASOs upregulated mouse ABCB11 mRNA expression greater than or equal to 1.5-fold as compared to untreated hepatocytes (FIG. 8). Visual representations of the chemical modifications are provided in FIG. 12.

### In Vivo Humanized Mice Assay

[0256] In a first in vivo study, the administration of ASO CO-3986 in the liver-humanized FRGR knockout mouse model resulted in increased human ABCB11 expression and liver bile acid efflux (FIG. 9). ABCB11 mRNA was increased which promoted efflux of hepatic bile acids. Moreover, lower levels of intracellular bile acids were observed in ASO-treated mice, which indicates an increase in bile acid efflux. Thus, ASO CO-3986 successfully upregulated ABCB11 RNA which lead to an increase in transporter protein expression and an increased efflux of bile acid.

[0257] In a second in vivo administration of CO-12367 in the liver humanized FRGR knockout mouse model resulted in increased human ABCB11 expression without affecting mouse Abcb11 expression (FIG. 15A). A decrease in serum bile acid levels was also observed (FIG. 15B), trending in the same direction as the positive control, OCA. Thus, ASO CO-12367 upregulated ABCB11 mRNA and had an impact on the bile acid metabolism pathway, indicated by a decrease in serum bile acids.

### ANIT Mouse Study

[0258] The ASOs targeting mouse ABCB11 regRNA, CO-4758 and CO-4765, were also tested for their ability to upregulate Abcb11 expression in an induced-cholestasis model. As shown in FIG. 10, CO-4758 increased both Abcb11 and Cyp7a1 gene expression in vivo in an induced cholestasis model (ANIT). Abcb11 mRNA levels were upregulated by ASO treatment in both conditions. Compensatory Cyp7a1 upregulation occurred only in non-cholestatic animals.

[0259] This data demonstrates a therapeutically relevant increase in target gene expression in Abcb11 regRNA targeting-ASO-treated mice versus controls in the well-established ANIT-induced mouse model. Furthermore, human ABCB11 regRNA-targeting ASOs likewise increase ABCB11 gene expression and decrease hepatic bile acids in a humanized liver mouse model.

[0260] Overall, ASOs targeting mouse and human regRNAs increased ABCB11 expression in primary human hepatocytes in vitro, in humanized liver cells in vivo, and mouse liver cells in vivo. The ASO can also increase bile acid export both in vitro and in vivo. Therefore, the ABCB11 regRNA-targeting ASOs can be used to augment expression of a healthy ABCB11 gene to treat diseases associated with excess bile acid such as PBC and cholestasis. Upregulation of ABCB11 enhances bile acid efflux from primary human hepatocytes in vitro, as well as in human hepatocytes cells in a humanized mouse liver model. Likewise, a mouse Abcb11 regRNA-specific ASOs upregulated bile acid regulator Abcb11 expression in a mouse model of PBC and can be used as surrogate for in vivo development studies.

### INCORPORATION BY REFERENCE

[0261] Unless stated to the contrary, the entire disclosure of each of the patent documents and scientific articles referred to herein is incorporated by reference for all purposes.

### EQUIVALENTS

[0262] The disclosure may be embodied in other specific forms without departing from the spirit or essential characteristics thereof. The foregoing embodiments are therefore to be considered in all respects illustrative rather than limiting the disclosure described herein. Scope of the disclosure is thus indicated by the appended claims rather than by the foregoing description, and all changes that come within the meaning and range of equivalency of the claims are intended to be embraced therein.

The application's sequence listing, which the Patent Office published only in electronic form, follows.

SEQUENCE LISTING (6033 sequences)

SEQ ID NO: 1 - RNA, 4200 nt, Homo sapiens
  source 1..4200: mol_type = genomic RNA
aaaatttcaaaaatgaaggtgaaaactataaattcctctgagggagccattcctagtgtctttctagccaagatgtgccccacccttgattcttgaacctgaatatgtgggttcctatgtgcaaataagctgttctgaacttgagccagcatgaggcacactgcaaaggccatgctatgacagtgagtcagccctgagtacacgacagactcactgattacaaggtggcctgtcaggcttatcacaaagaaaacagtagcatagtgactgtgtctgtgtgagttctggctacttctgcgtggttgcctctgatcacagcactgccctagttttctcacgcctgtaatctcagcactttgggaggctgaggcaggcagatgacctgaggagattgagaccagcctgtccaaaatggtgaaaccccatctctactaaaaatacaaaatttagctgggcatagtggcgggcgcctgtaatcccagctactcaggaggctgagtcatgagaatcacttgaacccaagaggcagaggctgcagtgagccaagatcacaccactgtactccagcctgggcaaaaaaggagactccatcttaaaaaaaaaaaaaaaagaaaaaagaaaaaaacaaactcaactactggttgagactagtgtaccttactcaaagtaatgcagcctgttcatgaaattcccattacagatggaagggttaagatcaagtggatcaccagccacagccacaaagctaaggggcagaggggagttggtgggggggaaaaatagaactcttggagatgatactcaagtaaaattcatgggtcacctccctagtgacgttaagtattggtagtgtcatgctcaagcctatactcaataaagtggtaacattttggcaatgtatttggtgagtgactttcaatcctgtttctattaagattttaaaacatagtaagatagaaggaaacttgaggcagagtaatttctagaaatatgggtaaactcatgtttctattctctttgtgttagataccactccagctcagccagtaaaatcccctctatacattttgaattacaatttaagatatgagcaaaaaagtaaaaaattaaaaacaaaaacaacctacccacaacgtgttccatttgtcatgttctggttgagggaactgttagtccatacaatggtgttattcacacatgcttttcctggaatctggagttcttgtaactcaacgtcgtagtcaataaaaacatctgtcattgtgccaaaaatgagtagcacgcctggctgggctattccatggagaaatgcacacaaacttcccacaaacatcagccaaatgtcagttgatgaagaaaaccgaaacttgaaaaacaaagggttcagagatcatctatgggtgaagagcaggagaggtaggaggactacttaatttagttactagattctcatgaatagtactcaacaccaaatttcatgggaatcaccttaattgagtggcagagttcgtatactaattatattgaaataaacggcacggtacatcaattatctaaaacattagactcttacattgttagatcatgttataaatttcctgctctctgaattcattctgtttatttcaggagctgactttcgtttttagctactcatctacaacttaggggaaaataatcactgtcattgatgccattgccaagtagataaactgtgtggggcattgagaaatactataaattgttttgttgaactgatagtgactatgaagaatgccaatttctgcctagaaatgcctccatcctgagaaaatttggagtaaacacctatactttaaaatttctaaagatttgtcataagaataaatatatatatgtgattgttgtgatgactttccttacaaatatgataaccatgggcttagtgataattttccaagacatttttctgatctattggataggatttgtatgctttatgagcaatatatttctaatagttattcagcatgttatcacataggcaaagcctatgactgaaaaagtgatcactgaagttaaaaacctgccaatatgactaaagatttaacactcccctcatgatctaaacaatttatagctgcacacccactgccataaatcaacacagttttattaccaattgaaagaagccaactctaacgccatcacctttcttctcatcttgtaacctgatgagaaaaacataaggatttaaagaccaccctttccaatacaatgggaaattctccctaggtggtgattttatgagttattctttagtaagaaagaaaatccccactggctggaaaattctggccaaacctagtatcttaaacacaagctttattcttctagatttccctcttctagagatttcagtatagctcaatctcaggttcactagcgattcacagagatgaacacctgagaggtatggagagaaagtaaaaagtcctctatactcccagttataccaacaaataactctttgccctcagtcatgaccctcaatctatttgtgactgcatttcctcatgggtaagttgaagtggttggattagctaattttaaagcttcctcatgcttaaaaatattacaactacattaaataatgttgataatgatgaaaaattcaagaacatgcccacacttttcatagaatcatatttccttaatatttcccattcatttcatttcccataaggccatgtttaacctgtatttgacctcttcaacttcggggatcttgacttaacctgagtcacgcagtccatgaatacaccctggaccttgctgtcaccaggaactactgtctgacatgtttaactccttggcactctgtgactgcccatgtacctcattttctcgcttccttcctccttccacacctatttgtcaacctcacttgagccatgcagtcctttaaatccttcatttccttccattgctaaaccccattaagattttgcttccttccccatgcagccaaggtccctctgccaggcatttgaaccacactctcaccatcatcctcaattattttctctacatcatccttgtaaacttcatcctgcatccatccagctgtttgccctcttctccttaagccaggctgctgggcctgctggacacaacctcaccaccttgtgaatggataccaacacaggcagagtctagtactcagctgccctaagcttcccttctggcccagaaaagaatcctaaattttttctgagactccccacggtctggcccttggctctctgacctcacctcctccaactatattctagttctcaacaccccacttgcctggcctcttgctgacctttgtccatgcccaactgttcccacctctgggtgcgggcacctgctactccttctccccaggtgcattttctttaggtaaccacagggacagctccatcacctccgctagaccttcctttgaaatcacctactcaacagagtcttgcctggccaaagtctttaaaatttcaaccccaccccccacgcaccatttcatagctccatttccagtttatttttccttctcagaaagaaagtgatagattatcactagctaccatgctatacatttgatttatttacaatgtttattatatctccctcactaaaatgtaaactcctcaagggccaacatttttgcctattttgttcttttctatacccgcagcacctacaatagtgtctgataccaaatagacactcaatatttgcaaaacgaatgaattaatggagtgaatgtgtgctctccagctcaacatgcaatgcacacttcatttctctgcggattgctcccattcttctcagcagctctggcaaaatttgctgtgatcttctcattccatgctcacctcctctaaaaacaaagcaactcattcaacttcctactcatcctctccttgccattcatctacatccacacccattttttaaacttcccacgcaataagaaacgtgtggctctcagaggcccaggctgacctgaccactcccagcccaaagctaatcttaccactcccacttcctccctctgctgtgaattacttaaaatttctaaaatacctttaacccttccgtttccaccacctccacttcaggaacttacctgatgcctcacttctgtcttctaaattagacctcatctaatcccgc

SEQ ID NO: 2 - RNA, 2700 nt, Homo sapiens
  source 1..2700: mol_type = genomic RNA
aaacatttaatatatgctaagaaacaaagaaaatagaaaggcattattttccagataagctcactgtcggttgatgctgtgtgtcaacactgtgggtgacccagtctgggaatagactaaaatgaggcccttccagccctgagggctatggctgatagggaagggaaataaatacacggtgatcccattggccacgtaagtcctttcttcagaggcaccgttgaggtagaggactaaagaattgcttaggaagaaaacagaatgtaacaccaaagttaactgccacagcgattctttgtctctaaatgtacagttctttcctcttttttttttttttttttttttttttttgagaggagtctcgctctgtcgcccaggccggactgcggactgcagtggcgcaatctcggctcactgcaagctccgcttcccgggttcacgccattctcctgcctcagcctcccgagtagctgggactacaggcgcccgccaccgcgcccggctaattttttgtatttttagtagagacggggtttcaccgtgttagccaggatggtctcgatctcttgacctcatgatccacccgcctcggcctcccaaagtgctgagattacaggcgtgagccaccgcgcccggccagttctttcctcttgaccaagcaaaacacaactccagtatttgatttctgcaatgaaacttgggcattttatggcaattgtagcatcttttaaaaccacaaaatgggcattttccccctaaatagcttcttaatccatttttaggagtcatcccctaatatttgtcaccattattcttggtactaggaaacaaaaattattcaaggggcttgcaatctagagtggggtggagtgtaaacagaagctcctagacagggaaatggaggcttcaaccagagacaatcacagtgttacagagcacagcagggggaaccaaggtgaggggggtgagcagtgaggggacgaggttgcccacagaaaagaacttctattaaacaacagctcataaataagttatcacttcaaatgtttaataaaaaccactactaactcctaatattaaaaagttttaggtataaccactataatttgtctctaacatctctaaaaagctattccccctcaaaatgttgacaaatactgtcttttattcccagtctgaagtgtgaataatatttgatctctgtgctcaagccattagcaatatgtgactcccactggcttgggtgacctaaaaactgaaattagatcctagaaacaaactttctcccctctaaacatgcatccacagctcatttttttttgcatctatatttttgaaaaccgggacaatgaagaaatgagtacggtgttggagaaaagataaagtcggtgtagttctgcattaaaccagctttcaagggtagaatttgtgatcattgaatctgtgattatcagagcaaacagaattgtgctttcacaaagccaagttaaaaaagaagcccactggtatttttactttgagcagattattcaatctattcggccatttgtaccacacacccatgtacaccactctctctctctctaagagattgatacatgaaatagcattgctataaagaagacagcaaccaagagtcatctgtattgtatacaatgttgtgaaatcattaatgcatcctgtaagtttctatccaagtattgtagcgttgtttacactggacaagagaccaatgtttaataaaccagaaacactccactccacaaagtaagagttaaagggaagagggaatggatttgcagagacaagtataagttacttacctgtgaatatgaatttgaggaagccagaggaaataatggactccactgtggagagttaaaaggtttcacaaccttttccaacctcggttttcatcattctaaagcactgaacagaattcaaactttttcaagaacattatctatttgcctaaggatcaatgtccctaagggcagcccaagcacagttcagtgacatacgagaaacatactcagagcaataaccccaaacacagagtgtgcttgggaaaccctctgagggtgtcaacaggccttggaaattgctgattcaccttggaacgagaggcaaattgagcagagtgggcccagcaagagccctggaattcaggctatcccaacccttattttttacaggcctgtagttgtgaaaagttacttaaaaacataacaagacaaaaaaaaaaaatacctttaaactttccccctcaatataaaagattgctcttggaaaatccctggttgcaggatccagatgctcctggcccagctatagagttttgtggagacaaataccctaaaagaacatttgaaacagccttgctcaaaagtctgagtgcacagacaactcttgcaccctggcatggacacaccagatgaagctctgtataagcaaagatgaacgattttctaaaggttcaaatgaacaggtcttgagtcaaataagcatgtggagctcctccaatatatttgtgctgcctcttcctctcccttcttgtgaatctttccatttttcctacaatgttcttattttttctcctttgcctgagcttacttttccctaaatgcctctcactccagccttcagcaatgaataataataggcaacattggtcaagacttggttgggtgcctggcccac

SEQ ID NO: 3 - RNA, 3000 nt, Homo sapiens
  source 1..3000: mol_type = genomic RNA
aaacatttaatatatgctaagaaacaaagaaaatagaaaggcattattttccagataagctcactgtcggttgatgctgtgtgtcaacactgtgggtgacccagtctgggaatagactaaaatgaggcccttccagccctgagggctatggctgatagggaagggaaataaatacacggtgatcccattggccacgtaagtcctttcttcagaggcaccgttgaggtagaggactaaagaattgcttaggaagaaaacagaatgtaacaccaaagttaactgccacagcgattctttgtctctaaatgtacagttctttcctcttttttttttttttttttttttttttttgagaggagtctcgctctgtcgcccaggccggactgcggactgcagtggcgcaatctcggctcactgcaagctccgcttcccgggttcacgccattctcctgcctcagcctcccgagtagctgggactacaggcgcccgccaccgcgcccggctaattttttgtatttttagtagagacggggtttcaccgtgttagccaggatggtctcgatctcttgacctcatgatccacccgcctcggcctcccaaagtgctgagattacaggcgtgagccaccgcgcccggccagttctttcctcttgaccaagcaaaacacaactccagtatttgatttctgcaatgaaacttgggcattttatggcaattgtagcatcttttaaaaccacaaaatgggcattttccccctaaatagcttcttaatccatttttaggagtcatcccctaatatttgtcaccattattcttggtactaggaaacaaaaattattcaaggggcttgcaatctagagtggggtggagtgtaaacagaagctcctagacagggaaatggaggcttcaaccagagacaatcacagtgttacagagcacagcagggggaaccaaggtgaggggggtgagcagtgaggggacgaggttgcccacagaaaagaacttctattaaacaacagctcataaataagttatcacttcaaatgtttaataaaaaccactactaactcctaatattaaaaagttttaggtataaccactataatttgtctctaacatctctaaaaagctattccccctcaaaatgttgacaaatactgtcttttattcccagtctgaagtgtgaataatatttgatctctgtgctcaagccattagcaatatgtgactcccactggcttgggtgacctaaaaactgaaattagatcctagaaacaaactttctcccctctaaacatgcatccacagctcatttttttttgcatctatatttttgaaaaccgggacaatgaagaaatgagtacggtgttggagaaaagataaagtcggtgtagttctgcattaaaccagctttcaagggtagaatttgtgatcattgaatctgtgattatcagagcaaacagaattgtgctttcacaaagccaagttaaaaaagaagcccactggtatttttactttgagcagattattcaatctattcggccatttgtaccacacacccatgtacaccactctctctctctctaagagattgatacatgaaatagcattgctataaagaagacagcaaccaagagtcatctgtattgtatacaatgttgtgaaatcattaatgcatcctgtaagtttctatccaagtattgtagcgttgtttacactggacaagagaccaatgtttaataaaccagaaacactccactccacaaagtaagagttaaagggaagagggaatggatttgcagagacaagtataagttacttacctgtgaatatgaatttgaggaagccagaggaaataatggactccactgtggagagttaaaaggtttcacaaccttttccaacctcggttttcatcattctaaagcactgaacagaattcaaactttttcaagaacattatctatttgcctaaggatcaatgtccctaagggcagcccaagcacagttcagtgacatacgagaaacatactcagagcaataaccccaaacacagagtgtgcttgggaaaccctctgagggtgtcaacaggccttggaaattgctgattcaccttggaacgagaggcaaattgagcagagtgggcccagcaagagccctggaattcaggctatcccaacccttattttttacaggcctgtagttgtgaaaagttacttaaaaacataacaagacaaaaaaaaaaaatacctttaaactttccccctcaatataaaagattgctcttggaaaatccctggttgcaggatccagatgctcctggcccagctatagagttttgtggagacaaataccctaaaagaacatttgaaacagccttgctcaaaagtctgagtgcacagacaactcttgcaccctggcatggacacaccagatgaagctctgtataagcaaagatgaacgattttctaaaggttcaaatgaacaggtcttgagtcaaataagcatgtggagctcctccaatatatttgtgctgcctcttcctctcccttcttgtgaatctttccatttttcctacaatgttcttattttttctcctttgcctgagcttacttttccctaaatgcctctcactccagccttcagcaatgaataataataggcaacattggtcaagacttggttgggtgcctggcccacttcaaaaatgttatttgtatcacctcatttgggcctctcaacagccctaggagttgggtgctatcatgtcatttctattttatagttggggaaactgaagcacagagaggttaaataatcctcctaaggtgtaacaactagtagatgtgaagccacatgccagtctgtgctaaccttcttccactctgtgctctgaaatgcaattgatgggccagtgcttcttaatttgcagaaattaaactgtaagatcaaattttctcaattttaggtttctctgtcataaattttttattaaaattc

SEQ ID NO: 4 - RNA, 2500 nt, Homo sapiens
  source 1..2500: mol_type = genomic RNA
agtgcacacaggcaacattgaaaggaccaagatggctgctgagagaagaggcaaaaagtggcttgtaaatttgcttaagtaggtgaagaaagacaaagaagggctttcagtgccagtaggatgagttgcatgcagtctaagataagaacttctgttcacggccacccagggccagtgtttacaaagctgagccacaagaaggatgggttaggcaggaagtcttgcacatgcacaccaatcacagaagctggttattaccaccctgaaaatcaatataaattgtgtaaagccagcatgagtcagttaacacaatataattggctatgtttttttgtggcatagagactagcagagagaaaaatgtctaaattagagctttcttaggtagcttatgtatttttaaagcaagctgtgtggaaggacacaatttctgtagtttagttgactgcagagggaggcagaatggtatagtgaaaagagcacaggcttgtgaagtcacaaagaactggctttagatcctggttttgccacttacttgttggatgatttggttaaggtagtgatacttgctaattatttcccctcatgtgaagtccagtaggccttgaataaggggaaatcggtgttgggcaaaggtgctctgctccatgcagtcattcagagacccaggctgacagaagctctaccatcctcaacatgtggcttttaaggtctccttggacatggacatgtatccatcacacagggaagagaaaatatggagcattttgtatggaaagttcctgtgggccaatcctggaagtggcatccattacttctactcagattccactggagaggactgtgccacataaccacacctaactgcaagaaagattggaagataaggtcaggctgtgtgtctgggaggtttagttaaaagttaaccaatctcaagagatggtctttgaaatcacaaaggtttgtgttcacttactagctatctaactttggacaagttacttaatctccattagcctcagtttcttcatctgtaaaatgggagtgagaataccacctgcacaggatgatgaggcctgcctgaacttccctgtgccatagattctggattgggagttcctcccccaagtagccatttaattgaattgtgtatatttttttacctaccaaaattagtgtattcctaattttgtcatgtacacatgtagaaaagactggaagaagtacaatataaaaagtgcttatctgtaggttatgcaaatgtgaatgagggtggttttcattttcttcctcatgcttttctgcatcttctaaattatatacaataagggtaaactattttttaaacatataagttattaaatgaaaataatgaatatgacaaaggaaatatcaataataatgcataataaaattttattaatgatttttagaaatacatagagagtacaactatgtgggtgttctccaaatattagctgtagttcagtcattgctttttttctgggaaaactctgacttctgcagaagggatggggccgtcatctggacatcacaagcaaagtttctgtggattcaaagcccattaagaacttgctttatcctaacacagaccagccctgtgtcatggtacctgatgctcctgctcagtggtgtgccctgaatgtcctgaacctggaggtagatccaccctatcccagctctctgcctcatctggctctcccaaaagctggctatcactgatcccctttggctcagtgcctagtttgctccacctccacatcatgtctgggtagggctcctggaattccttcaggcctcacttgtgggccatttagagtaaaatagtgggcacatacaacacttcattatggtcttcaaaccatgtttcctttaagatgatcttaaggacgaaagtaagaaatagtgagttgagtaagtccaatgtattattaaatgttttatgctccctctgtagaattaataacgccaaataagactaattacaatcctagcaagttgtcatttatagttatctaaatgaaatacattgatctccacagcactcagtacttggttagaatttatatttttggttctccctctaatgaggaaaaccagcacaaaaaatatggacttcattcataagcaaatcttttctgatgtttttgagtgcggtagttcttgtctttccctgaaggctcattattgtgcataaagttataaaaattataagggtacctttataattgccaaatgaaaagaaataggtgaaataaataaagaagaggaatcagagagaattctgctacagaacaaaagtcaattataagtaattgtgcctgcagtgttgaatactcatttgaactgtagaatttatcactcgcaaggggcaagtctgcctgggggtatgggtagattggattttcatgtcttggctttatccaggacacctcccttcttaaagtcatgtttcagtcgtggaaactattcctttgtt

SEQ ID NO: 5 - RNA, 2001 nt, Homo sapiens
  source 1..2001: mol_type = genomic RNA
aacttgtccaaagttagatagctagtaagtgaacacaaacctttgtgatttcaaagaccatctcttgagattggttaacttttaactaaacctcccagacacacagcctgaccttatcttccaatctttcttgcagttaggtgtggttatgtggcacagtcctctccagtggaatctgagtagaagtaatggatgccacttccaggattggcccacaggaactttccatacaaaatgctccatattttctcttccctgtgtgatggatacatgtccatgtccaaggagaccttaaaagccacatgttgaggatggtagagcttctgtcagcctgggtctctgaatgactgcatggagcagagcacctttgcccaacaccgatttccccttattcaaggcctactggacttcacatgaggggaaataattagcaagtatcactaccttaaccaaatcatccaacaagtaagtggcaaaaccaggatctaaagccagttctttgtgacttcacaagcctgtgctcttttcactataccattctgcctccctctgcagtcaactaaactacagaaattgtgtccttccacacagcttgctttaaaaatacataagctacctaagaaagctctaatttagacatttttctctctgctagtctctatgccacaaaaaaacatagccaattatattgtgttaactgactcatgctggctttacacaatttatattgattttcagggtggtaataaccagcttctgtgattggtgtgcatgtgcaagacttcctgcctaacccatccttcttgtggctcagctttgtaaacactggccctgggtggccgtgaacagaagttcttatcttagactgcatgcaactcatcctactggcactgaaagcccttctttgtctttcttcacctacttaagcaaatttacaagccactttttgcctcttctctcagcagccatcttggtcctttcaatgttgcctgtgtgcactcatgctgtatttatgacctggtccctctcatactttgagatataactcaagtccttccttctttgagaatccatactgatgggtcactttttaaatacttaaggtctgcatcaaacattataacatttgctgttcttcttttttattcttacttggtttatatactaagctttattatccttttaaggttaaaactttctcaaggacactaactgtaatgtgtacaacttggtagccagcgtaacatttgacatagtgtcttgtaaaaagaagatactcaatcagtttttgaatgattcaaagagtaaaataatggcaacttcttttatctcttccatagtgcaatcttcaatattttttaaacaactattggctgaattctaccattgtggtttagagctttctctgagacatttttgctaaggttttgaaacaggttccaaattggtccacagtgacctccaaggctctacaggagtggtcctcaagcttcagctcattgggccccactcccagagtttctgattcagtaggtctcaggaaaggaccaagaacatacattcctactgggtaatgaggaggctgctgctggtccagtagtcacactttcagagccactgccctgtgagctcatggcactccatgattcccgccacactgacataatccccagctgacttcagtcttgcttactccactccaggttcagcttccttacatacaccaggcatgctcctgcccagagctttgcccatgtggtttccccagatacccatgtacttgttcctttacctccctcaggtcattcctcatatgtcaccatctcagtgggcccttccataaaacccagttaaaaatggcaacatccttctcccctcacacgctaactgacacacacacatacacaaacacactctctctctcacacagcatacgtacacacactccctatcatatccctttcctgcaatgcttttctccataccatttacaccatctga

SEQ ID NO: 6 - RNA, 5050 nt, Mus sp.
  source 1..5050: mol_type = genomic RNA
ttttaatgacttcaagtcacaaagacactgaagaatttttagcattaaatgtggtgaaaagccgggcagcactcaggaggcagaggcaggcagatttctgagttcgaggccagcctggtctacagagtgaattccaggacagccagggctacacagagaaaccctgtctcgaaaaaccaaaaagaaaaaaaatgtggtgaaagtacactgaaaacagaaaattagtagaaaataaataaggtcttgtttgtgaatttccccagaaaaaaaaaattctaaaattctaaaaacaaatacaaaaagaaggaaggaaggaaggaaggaaggaaggagggagggagggagggagggagggagggagggagggagggaggagaggggaggggaggggaggggagggaagggaagggaagggaagggaagggaagggaagggaagggaagggaagggaagggaagggaaggagaaagaaaaagaaagaaagagagagagagaaagaaagagagagagagaataaaagaaaatatgtcttaggactggatgttcgatgccttgcctcatataattacagtgtagaatgcaaccaatctgtattagaccacatcttcacccattggctgactcaggaacagtcctggaaacggcttgtagtagtcctgttagtctctgaaaccctagcaatgaggtaggaatccgattctcaacgacaaacaggtttggcaggtgcttgagactatgagaaggttttttttgttgtttggtttgttagttgttttgttttgttttgttatcaactgaagcagtcacaatgttgctgagtcctactttttcagctcatatcttataatgtccaattagcacctaaactattttaatccattgccaaaaactataatcagaatttcttaataatttacagtaataaaaattttaaattaataacacataattcagagctgaaaacaaaatttaatgttattcgcttttcctctgaaattccatgtaatgaattatttttatctctcccaaatctctgaggaaaggactgagaattttcaagcctttcagaaaaatcaattttctgtaacatcggagaatctagcagtttaaagcaggaaattaagatttctacataatggttatctgacttggctgtgtaagtaggaacacctcaagaactcttatttgaccacaaaacccccagtgtccctctctgttccatgacatgtgatatttaacctgcctactatatatatgtgcttctgttcaactagggtgaagtttccttttgataaaagatggaatcttatcaattcagagccgaacactggaggtcagtcccatgaccataactggtagcctcagcagtgacttttctatcttagaacatttgcatcagctcctggaagagcacagtcgagcagaagggtggagcccagcgtctgcatggattgtccttgagaacctaagggatgagagcatccagcgatggggacgaatgaggggcctccgagatactccagatgaaaggggacaaacacaggctcctgtgagccacgcaggtacaggacaaaaagtcaaggtcctccagtttcttgtgtgcatctcatggtggccaaggtgctttgtgacttggtggaaataccaggctagagcagcacatgaatgggctgaacttctctaagggcctggtccacactaacagctgagtctggtattgcaaataagaaggaagggagggagggaggaagggagggagagagggaggaaggaagggggagagggaggaaggaagaagaaatggattctcagaagctggtctcagaatgaagaatcctacaatcctactgcagtaagagcaaggaccccgccgttccccctccctctctgaatcatgattttattgaaatatagttattacactcatcattttgttgtctttggttgcgtcatcgaggatctctgacacaaagtgaatgttcctgctgcattcactctcgggctctttacggaagagccttctgcactgggtgtcctcttcccatcccagccacacaaagtcagttcagaacagtgggggagttctcaaggaggttacttcccgactaaaatatttagtgtgccaaaccttgtaacctgatttaccctagtggagcttccggaggggacagaagacaggtgacagaattcatggaaaactacagaccttggctgagggagaagcatgggcactagcctgggaaggctctggaatgtgcatattcaccttggatttgggaggaaaacccaaagtagacaagggaaggtggagaggagggaagaacacatagaaggcccagaccccagagacagaataggagcaagggacgaaggatggactccccactaggtctggggagtacagggccatctctggagcagctgtcgatcccttggttccttgtgatctttaaccctggggattggggctttatcctgagaacaacggaagctagtgaggggttaacactttaacatctccgataagtcttgggattttgtgattattagttcaaatcatgcttctataatgccaagtttaaaggacatctctctggggtttttattttgggtgatctcttttttcaatccattcacctaattttgccacacacacacacacatttttgagacaactgaagtacaaaatagcactgctgtaagaccgttaccaggcctccctcactgtatataatactaagaagtcagccatttgtcttcacacgtctacccaagcactgtagctttactggatgacaaggttgggcttttggtaaatctgaaccacaaccctcccccataaactgagactaccaaataaaacagactcggaaagcaaagacttaaaaaacgccataggcaaatgagagtcacttacctacagatgtgaatttgagggagccaggagaagcgagagacgccactgtggaaagtcagggttgtacacccctttccaagttcagttttcatggtaataaagcattgaacagaaatcaggcttttttaagaacactatctatttgcttataggtcaatggcctaaagtccagatctagcacagttcagtgacatgagaggaaaggtcgaacatactcaaagcaggaacccaaacccagagtgcgtggggaccttctgagggtatcaacaagctttagaaaatgcccagttgcccgagagtggggcctcatggtagagagcctggtgagaggcccgactcttcttttttaagccctaggttttaaaaagtaactttaaaaaaatctaacaggaccaaactacttcttatcgtctctgctctatttgaagtgacccttgtgacatcctgggttgcaggccctcagtgatctggagccagccccaaagtttcatggagaattgataacatgcaattgccttctgctcagaactctgtgcacacagatgacccttgaactctggtctgagcagtcaatagcctcaagctctgcccactagctgcagcgctgtataagtagaaatgcattactttaaaaaacacattcccattaacaaaacctcaaagcaaataagcttagaactggctgtgacttttcgtatgccttcttactattaatctccacatatttctttaaaaaaacaagttttaccatttttcttcttcattaatttcaattgcattgtattataaaaagtaatatggccatatgattcaaaatgctatttagtttttatatttcttcctggaaaggggatgtaagattgttactggacatggggtcccaacttgtgctccaagtcagaaccgatcagctgccttctataggccaataaaatagccaagttagtaatagaaagcagagaaaggagatttattcagtgttccacattgggaaaaaaatacagagatccagtgtatatccagttttgggctcctgaaatgagaccagaatttaattagaacaccaaatgcacatcttagcagtgccagttaaaatatgatcctgcccaccactgactgggcttcaggctggttcctgaagtggtctaccaagttgtgagacttgtgtgaagtctcaagagactagttcttgctctggctggtatctctttcttctcccagagtgagattcctgaggaaatttcaatttggaggtgggaggaccagattcactacagtagtctgatggtcagatggagagacacatagcatctctttacactatcttcatttcttccaggccagagagaggacaagaaaaaaggctgagcttgcaagactgtggttcttaaagcatacccaccacaccagagatggctactgagcataaaggttacaatacagtggtatgcatgcttacctaagaaggtgaaggtaggccaagaacagttttcagaatcaaggagatgaattgcagacagactggaatgttagccctgtggctcagaataataggaatggttttgtggagaagtcttccaccaactatcaactcttgtttggttattatagccctgcagatcaaaatgaattggaaaaactcaacaccaattatctaacacaacataattggctgtactttggtagagtagggaggtttaactcattacagagagaagcaaaaggaactggcttcataattaggttctagcacttgcttctcgatttagctatggtaatgatgcttgctctactggctggttttgtgtgtcaacttgacacaagctggagttatcacagagaaaggaacctcccttgaggaaagacctccataagatccagctgcaaggcattttctcaattagtgatcaaggggggagggcccattgtgggtggtgccttccctgggctggtagtcttggattctagaagaaagcaagctgagcaagccaggggaagcaaaccagtaaggaacatccctccatggcctctgcatccgcttctgcttcctgacctgtgtgagttccagtcctgacttcttttggtgatgaacagcaatgtggaaatgtaagctgaataaaccctttcctcccc

SEQ ID NO: 7 - RNA, 2400 nt, Homo sapiens
  source 1..2400: mol_type = genomic RNA
aaaatttcaaaaatgaaggtgaaaactataaattcctctgagggagccattcctagtgtctttctagccaagatgtgccccacccttgattcttgaacctgaatatgtgggttcctatgtgcaaataagctgttctgaacttgagccagcatgaggcacactgcaaaggccatgctatgacagtgagtcagccctgagtacacgacagactcactgattacaaggtggcctgtcaggcttatcacaaagaaaacagtagcatagtgactgtgtctgtgtgagttctggctacttctgcgtggttgcctctgatcacagcactgccctagttttctcacgcctgtaatctcagcactttgggaggctgaggcaggcagatgacctgaggagattgagaccagcctgtccaaaatggtgaaaccccatctctactaaaaatacaaaatttagctgggcatagtggcgggcgcctgtaatcccagctactcaggaggctgagtcatgagaatcacttgaacccaagaggcagaggctgcagtgagccaagatcacaccactgtactccagcctgggcaaaaaaggagactccatcttaaaaaaaaaaaaaaaagaaaaaagaaaaaaacaaactcaactactggttgagactagtgtaccttactcaaagtaatgcagcctgttcatgaaattcccattacagatggaagggttaagatcaagtggatcaccagccacagccacaaagctaaggggcagaggggagttggtgggggggaaaaatagaactcttggagatgatactcaagtaaaattcatgggtcacctccctagtgacgttaagtattggtagtgtcatgctcaagcctatactcaataaagtggtaacattttggcaatgtatttggtgagtgactttcaatcctgtttctattaagattttaaaacatagtaagatagaaggaaacttgaggcagagtaatttctagaaatatgggtaaactcatgtttctattctctttgtgttagataccactccagctcagccagtaaaatcccctctatacattttgaattacaatttaagatatgagcaaaaaagtaaaaaattaaaaacaaaaacaacctacccacaacgtgttccatttgtcatgttctggttgagggaactgttagtccatacaatggtgttattcacacatgcttttcctggaatctggagttcttgtaactcaacgtcgtagtcaataaaaacatctgtcattgtgccaaaaatgagtagcacgcctggctgggctattccatggagaaatgcacacaaacttcccacaaacatcagccaaatgtcagttgatgaagaaaaccgaaacttgaaaaacaaagggttcagagatcatctatgggtgaagagcaggagaggtaggaggactacttaatttagttactagattctcatgaatagtactcaacaccaaatttcatgggaatcaccttaattgagtggcagagttcgtatactaattatattgaaataaacggcacggtacatcaattatctaaaacattagactcttacattgttagatcatgttataaatttcctgctctctgaattcattctgtttatttcaggagctgactttcgtttttagctactcatctacaacttaggggaaaataatcactgtcattgatgccattgccaagtagataaactgtgtggggcattgagaaatactataaattgttttgttgaactgatagtgactatgaagaatgccaatttctgcctagaaatgcctccatcctgagaaaatttggagtaaacacctatactttaaaatttctaaagatttgtcataagaataaatatatatatgtgattgttgtgatgactttccttacaaatatgataaccatgggcttagtgataattttccaagacatttttctgatctattggataggatttgtatgctttatgagcaatatatttctaatagttattcagcatgttatcacataggcaaagcctatgactgaaaaagtgatcactgaagttaaaaacctgccaatatgactaaagatttaacactcccctcatgatctaaacaatttatagctgcacacccactgccataaatcaacacagttttattaccaattgaaagaagccaactctaacgccatcacctttcttctcatcttgtaacctgatgagaaaaacataaggatttaaagaccaccctttccaatacaatgggaaattctccctaggtggtgattttatgagttattctttagtaagaaagaaaatccccactggctggaaaattctggccaaacctagtatcttaaacacaagctttattcttctagatttccctcttctagagatttcag

SEQ ID NO: 8 - RNA, 1500 nt, Homo sapiens
  source 1..1500: mol_type = genomic RNA
agtgcacacaggcaacattgaaaggaccaagatggctgctgagagaagaggcaaaaagtggcttgtaaatttgcttaagtaggtgaagaaagacaaagaagggctttcagtgccagtaggatgagttgcatgcagtctaagataagaacttctgttcacggccacccagggccagtgtttacaaagctgagccacaagaaggatgggttaggcaggaagtcttgcacatgcacaccaatcacagaagctggttattaccaccctgaaaatcaatataaattgtgtaaagccagcatgagtcagttaacacaatataattggctatgtttttttgtggcatagagactagcagagagaaaaatgtctaaattagagctttcttaggtagcttatgtatttttaaagcaagctgtgtggaaggacacaatttctgtagtttagttgactgcagagggaggcagaatggtatagtgaaaagagcacaggcttgtgaagtcacaaagaactggctttagatcctggttttgccacttacttgttggatgatttggttaaggtagtgatacttgctaattatttcccctcatgtgaagtccagtaggccttgaataaggggaaatcggtgttgggcaaaggtgctctgctccatgcagtcattcagagacccaggctgacagaagctctaccatcctcaacatgtggcttttaaggtctccttggacatggacatgtatccatcacacagggaagagaaaatatggagcattttgtatggaaagttcctgtgggccaatcctggaagtggcatccattacttctactcagattccactggagaggactgtgccacataaccacacctaactgcaagaaagattggaagataaggtcaggctgtgtgtctgggaggtttagttaaaagttaaccaatctcaagagatggtctttgaaatcacaaaggtttgtgttcacttactagctatctaactttggacaagttacttaatctccattagcctcagtttcttcatctgtaaaatgggagtgagaataccacctgcacaggatgatgaggcctgcctgaacttccctgtgccatagattctggattgggagttcctcccccaagtagccatttaattgaattgtgtatatttttttacctaccaaaattagtgtattcctaattttgtcatgtacacatgtagaaaagactggaagaagtacaatataaaaagtgcttatctgtaggttatgcaaatgtgaatgagggtggttttcattttcttcctcatgcttttctgcatcttctaaattatatacaataagggtaaactattttttaaacatataagttattaaatgaaaataatgaatatgacaaaggaaatatcaataataatgcataataaaattttattaatgatttttagaaatacatagagagtacaactatgtgggtgttctccaaatattagctgtagttcagtcattgctttt

SEQ ID NO: 9 - RNA, 1000 nt, Homo sapiens
  source 1..1000: mol_type = genomic RNA
aaagaacagtacaactaagtgattcttcaatgactcatctcaaatcttcattccgatgacttctcaaggcttcgctgagtgatccctcacccaaatgattattgacttccctctcctccctcaccccagatttctcatgtgtcactgccaattcaaattcatggctaaagcactaatctctttccacacctctacttcctggaatcctttcttgttatcagtcttatatctatgcccaattcagccagccattggggtaatgaactttccattctagaaccacagtccaatttgcctgttacctcactgagaaggctctggggctctgacaaacactgctgtgagtttcctgaaacctacttttttttttttttttttttttttttttaacttttatttcaggctcaggagtacctgtgcaggcttgttatataggcaaactcctgtcatgaggatttgatgtacagattatttcatgacccaggtactaagcctagtaactcaatagttaatttttctgctcctctccctccccccatcctccaccctccaatgggcccccagtgtctgttgttcccctctttgtgtccatgagttctcatcatttagttcacacttactggaaacctcctttggccacattttgacactatgtcaggagaggttggatcctccaacccctgccgagatcactgcagatacttagagcctggataagatgatcaacagtgctttaaatagcttatattttaaaaagctgtgctgaatgttttgcaggccactgaggtgcggacatggttttatatcagtgagatcacaggtgagcaaggtgttattggctataatgtttgaaaatcagcctttaacatctgattatatttgacttcttatttgagtgtccttggaccatgtgtgatcagactgctatgtgaataaaataagataatgtataaattttctataacttcttcatgcataaaatcctattaacattgctgat

SEQ ID NO: 10 - RNA, 2071 nt, Homo sapiens
  source 1..2071: mol_type = genomic RNA
atgcagtttttcagttaaattctattctcatttatagcacagttttagtatgcctgattccataacgtgctatctaatgtggctgctctaataataatttctcagtccttgggagtgtttttagctgatgtgacccgaaattcctattcctatatgttgtccaggcctcaattcctggggaaccgagacagtgactgggataactcttggaatgggtcagatcacctctctctgaaagaggttatctgaaagataagatgaaatggagaacacagttgtgattgcagaaatccttcttgtgtgcttgttaatgctctttgtctgttgtgccttttcagggaagtgcccaagcttgggaggacatggagaacaataggcatattggagagtgagtggggtttggagtcagagccccttagacttgaatcctactctgccagctgtgcagtcccagacaaatccccttacctttctgagcctagtttcttatatttaaaatgatgttagtgctcactttataagattgttgtaaagattagagataatgactattaagctcctagtagtgcctagagaaacagtgaatgctcaataaatgtaattgctgttaataaaacaatatttacctattaaaacatcattaatccctattcgatgaaatgtcatttgacactggggagtaatctaacaaactacatgaagatagtgataattatgttgctaactgtactcaggaaaagggactcaagcttcacatttttggctgtttatgaaggcaaatgtcttcccatggagagatgcaaaaagacattcttaccagaccaatggtggctgctccaatcccaatgagagggctgacagaaataataaccaaggtcagtttccaacccctgaaaaatcccaacaggaaaccacagatggtcgaggtcatgcgctgaatgaaaagggccatttggtcagctatggcatcattgattttattaatatcactagaaaccagaaagattttggtcactaaaactgaatttgatcattcaaatatcttgctgaaagtctcagtctttcccttttaaacattcccatctctctatccctatcacccttggatagcattaacagcctctcagatcttggaaaatttgctgcaccttgggatgttatcaagcctctttcctgatagccaatcaattttgttcttaatctaggtttcccagctggtactcagtgttgataaaggcttttggaaaccatcttatttgtctttttcttttacatagctaatatccttgctctgtcttgcaaagcttttctttcttcatgcctgctgaatcctttcagcctcaaggttctagtcacataccttctcgtgcatcaatcttgtataatcccccaagaagaagtaacacctttctccctgtgtttccgtaacactgtaattaatccttgtgcatttgtatgtgtgtggaattattgcattctgcatataggcagtatagagtagtggtgaagagtgcagattctggagccagactaggaatttgaatacagactcttgttgggcaagttacttaacctttttgtggctcaattttcttgtctgtaaaataagaacaataatagaacctaccccaatgggtaataatgaggattaaagtagcgaatatatgtaaagcctataggacagcgcctatcatataataaacaatatgtgttagttctgattatttgcttgcatttcttatttcccctacgaggctgtaagttcctcaagagcacaagtgcaaggcaattgctccagaatatttattgaatataattatattaaattcatattcctgagaacatttccttaatctcttgtccagttggagtgaagagagcttggaactaaacagcaagaaagaacctaagacatcacccaggtattaggccattgtgttccagcagggttagataactgctcaaggtcacagtaaggagcagagtaagtgccggaagtcaggggtcctgaatttcagtgtgctttatctacactgtagagtgactgtctttcaggggacctcaaaattca

SEQ ID NO: 11 - RNA, 3501 nt, Mus sp.
  source 1..3501: mol_type = genomic RNA
agagagagagagaataaaagaaaatatgtcttaggactggatgttcgatgccttgcctcatataattacagtgtagaatgcaaccaatctgtattagaccacatcttcacccattggctgactcaggaacagtcctggaaacggcttgtagtagtcctgttagtctctgaaaccctagcaatgaggtaggaatccgattctcaacgacaaacaggtttggcaggtgcttgagactatgagaaggttttttttgttgtttggtttgttagttgttttgttttgttttgttatcaactgaagcagtcacaatgttgctgagtcctactttttcagctcatatcttataatgtccaattagcacctaaactattttaatccattgccaaaaactataatcagaatttcttaataatttacagtaataaaaattttaaattaataacacataattcagagctgaaaacaaaatttaatgttattcgcttttcctctgaaattccatgtaatgaattatttttatctctcccaaatctctgaggaaaggactgagaattttcaagcctttcagaaaaatcaattttctgtaacatcggagaatctagcagtttaaagcaggaaattaagatttctacataatggttatctgacttggctgtgtaagtaggaacacctcaagaactcttatttgaccacaaaacccccagtgtccctctctgttccatgacatgtgatatttaacctgcctactatatatatgtgcttctgttcaactagggtgaagtttccttttgataaaagatggaatcttatcaattcagagccgaacactggaggtcagtcccatgaccataactggtagcctcagcagtgacttttctatcttagaacatttgcatcagctcctggaagagcacagtcgagcagaagggtggagcccagcgtctgcatggattgtccttgagaacctaagggatgagagcatccagcgatggggacgaatgaggggcctccgagatactccagatgaaaggggacaaacacaggctcctgtgagccacgcaggtacaggacaaaaagtcaaggtcctccagtttcttgtgtgcatctcatggtggccaaggtgctttgtgacttggtggaaataccaggctagagcagcacatgaatgggctgaacttctctaagggcctggtccacactaacagctgagtctggtattgcaaataagaaggaagggagggagggaggaagggagggagagagggaggaaggaagggggagagggaggaaggaagaagaaatggattctcagaagctggtctcagaatgaagaatcctacaatcctactgcagtaagagcaaggaccccgccgttccccctccctctctgaatcatgattttattgaaatatagttattacactcatcattttgttgtctttggttgcgtcatcgaggatctctgacacaaagtgaatgttcctgctgcattcactctcgggctctttacggaagagccttctgcactgggtgtcctcttcccatcccagccacacaaagtcagttcagaacagtgggggagttctcaaggaggttacttcccgactaaaatatttagtgtgccaaaccttgtaacctgatttaccctagtggagcttccggaggggacagaagacaggtgacagaattcatggaaaactacagaccttggctgagggagaagcatgggcactagcctgggaaggctctggaatgtgcatattcaccttggatttgggaggaaaacccaaagtagacaagggaaggtggagaggagggaagaacacatagaaggcccagaccccagagacagaataggagcaagggacgaaggatggactccccactaggtctggggagtacagggccatctctggagcagctgtcgatcccttggttccttgtgatctttaaccctggggattggggctttatcctgagaacaacggaagctagtgaggggttaacactttaacatctccgataagtcttgggattttgtgattattagttcaaatcatgcttctataatgccaagtttaaaggacatctctctggggtttttattttgggtgatctcttttttcaatccattcacctaattttgccacacacacacacacatttttgagacaactgaagtacaaaatagcactgctgtaagaccgttaccaggcctccctcactgtatataatactaagaagtcagccatttgtcttcacacgtctacccaagcactgtagctttactggatgacaaggttgggcttttggtaaatctgaaccacaaccctcccccataaactgagactaccaaataaaacagactcggaaagcaaagacttaaaaaacgccataggcaaatgagagtcacttacctacagatgtgaatttgagggagccaggagaagcgagagacgccactgtggaaagtcagggttgtacacccctttccaagttcagttttcatggtaataaagcattgaacagaaatcaggcttttttaagaacactatctatttgcttataggtcaatggcctaaagtccagatctagcacagttcagtgacatgagaggaaaggtcgaacatactcaaagcaggaacccaaacccagagtgcgtggggaccttctgagggtatcaacaagctttagaaaatgcccagttgcccgagagtggggcctcatggtagagagcctggtgagaggcccgactcttcttttttaagccctaggttttaaaaagtaactttaaaaaaatctaacaggaccaaactacttcttatcgtctctgctctatttgaagtgacccttgtgacatcctgggttgcaggccctcagtgatctggagccagccccaaagtttcatggagaattgataacatgcaattgccttctgctcagaactctgtgcacacagatgacccttgaactctggtctgagcagtcaatagcctcaagctctgcccactagctgcagcgctgtataagtagaaatgcattactttaaaaaacacattcccattaacaaaacctcaaagcaaataagcttagaactggctgtgacttttcgtatgccttcttactattaatctccacatatttctttaaaaaaacaagttttaccatttttcttcttcattaatttcaattgcattgtattataaaaagtaatatggccatatgattcaaaatgctatttagtttttatatttcttcctggaaaggggatgtaagattgttactggacatggggtcccaacttgtgctccaagtcagaaccgatcagctgccttctataggccaataaaatagccaagttagtaatagaaagcagagaaaggagatttattcagtgttccacattgggaaaaaaatacagagatccagtgtatatccagttttgggctcctgaaatgagaccagaatttaattagaacaccaaatgcacatcttagcagt

SEQ ID NO: 12 - RNA, 2001 nt, Mus sp.
  source 1..2001: mol_type = genomic RNA
aatcctgtccttacaaccactggaggaaacaaaaaactcaaagctaagcagctctctctctctctctctctctctctctctctccctccctccctccccccctctctcagttctctctctctctgcctcatcttttccacttcccatgtaacctcctctctaaacaaacagttttccctggtgataaggaacagagagggactttttagtcattcaggatgcaccctctatactgtcattgagcacccctcagggctgacggtcatctccaagactggtgtcccaaaggacatgtaaccctgaccttgagtatcattgatttgtgaggcccacctttactattgtctgtaaatgttagtctttcttttagtctctgcattctgtattcttctaggtcactggactaggccagctgcaaaccaacatggatctttgacccctagtagaacaacaatcccaggtcagggctttcagggccatgacctgcatgacctgcatagagaaagggacagccagtcagctcacctgagaagtaaatgaataaccacagctagcacaactgccccaaccactcttccatgaactgtggtcacatctctgcagttcccgggtgccaggtgacttatcagtaggcctttgacctcggttgctttagttgtttatcagctgtgtgtttcaatttatctcacaccaacctgtttgctaaagagtgcccattccttggctccaagcactaaagctgttttggggagtacatccctcagaaaactcagagtactttatgcatcctctctgagccttgcccagtggcagctcagggctaggatgttttcattagagagcacctatcgaaacaacatggcttaatatgttgcaccttccctgctgaaagggctgctctgtctatttcttggatgtaagcaaaggctttccaattacagcccttttgatattttgaattccataattaataaggtgaagtctggctagtgtatggcatgctcagcaggatccttgacttctacacatgacatgtcagtaacacttctgataacgatgtcaccagacagtgctaagtgtcccttaggggacaaaattgctcctccttgagaactgctgtcatagagattcctttcttgagggtccagaatgtcactgtacccaggaccacttgtttggaaactcagtcattactgttgtagtgatgtttccttgatgggcggttatattcgttaatgacactaacagagaggttttgctgcttaaaaaactgctcatatcctgttttggcaagcactaacttttgtaatgtaaaaaatatctacttttcttattatgaggatagaaggtatccaacaaaccgagttatatataatgacatttatggatttagaaatgaccacattggcaagcacagcattgagtgctactaaggcctggatcctggctgagctggggctatgacagctcgcacttggtagaaaatcgagcctctaggattctgcaaatgctcccaggaaccccatagtcctcagatttccggttcataaagtcaggtgccaatgtgaacagcagctgtggttgactggatgccacagccttttgaactgtggctatagggtcaggtagctgaatgtgggattaaaaaaaaagcaacagtgagaggttattgaatgaacaataattaaaaattatttcaaaaccaaagataatggatccaaggtttgggtaggacttgtccttcttgtgttgaatggtttccccgttagccaaggttctgagcacacagcacacacactttgcctagaccaccttggctcatagtggtgactcttgtatgtgaagatcttgtatgtgaaatattttcagcatatgtaggataggaatttttttttctttttagaatgtaataaattacgggaaggaagggcttaatattttcttagttattcttcctcatggaagtaccacactgggatgtctttggattggattgtgatg

SEQ ID NO: 13 - RNA, 2001 nt, Mus sp.
  source 1..2001: mol_type = genomic RNA
gttagtgcttgccaaaacaggatatgagcagttttttaagcagcaaaacctctctgttagtgtcattaacgaatataaccgcccatcaaggaaacatcactacaacagtaatgactgagtttccaaacaagtggtcctgggtacagtgacattctggaccctcaagaaaggaatctctatgacagcagttctcaaggaggagcaattttgtcccctaagggacacttagcactgtctggtgacatcgttatcagaagtgttactgacatgtcatgtgtagaagtcaaggatcctgctgagcatgccatacactagccagacttcaccttattaattatggaattcaaaatatcaaaagggctgtaattggaaagcctttgcttacatccaagaaatagacagagcagccctttcagcagggaaggtgcaacatattaagccatgttgtttcgataggtgctctctaatgaaaacatcctagccctgagctgccactgggcaaggctcagagaggatgcataaagtactctgagttttctgagggatgtactccccaaaacagctttagtgcttggagccaaggaatgggcactctttagcaaacaggttggtgtgagataaattgaaacacacagctgataaacaactaaagcaaccgaggtcaaaggcctactgataagtcacctggcacccgggaactgcagagatgtgaccacagttcatggaagagtggttggggcagttgtgctagctgtggttattcatttacttctcaggtgagctgactggctgtccctttctctatgcaggtcatgcaggtcatggccctgaaagccctgacctgggattgttgttctactaggggtcaaagatccatgttggtttgcagctggcctagtccagtgacctagaagaatacagaatgcagagactaaaagaaagactaacatttacagacaatagtaaaggtgggcctcacaaatcaatgatactcaaggtcagggttacatgtcctttgggacaccagtcttggagatgaccgtcagccctgaggggtgctcaatgacagtatagagggtgcatcctgaatgactaaaaagtccctctctgttccttatcaccagggaaaactgtttgtttagagaggaggttacatgggaagtggaaaagatgaggcagagagagagagaactgagagagggggggagggagggagggagagagagagagagagagagagagagagagagctgcttagctttgagttttttgtttcctccagtggttgtaaggacaggattttctagagggcagaagacaggcagcccaggtcactacaaaactctgtcattatgttttgtctgtagagcccaaagccgttccaataaagtccttggggtgggaggtttcatttttctttccccaatttttactttgtatttttttgagatacagtcattcacatagggggtcctgactccaggaccctctcacacgtggtgactctacagccctcttacgcacgggcttccgaacctgcggattgctaatgtataaaatggcacagttcaagcatatgacctgtgtggcacctttgggcgtacattaaattgcttctagatcatttgtaatgcctagtatgaatgctgtatacatagtaacactgttgttcaggagagaagaacaatgaaaaggtctgtgtgtggtcagtggagattcagtttacaaaactactcaaacctgcagtcggttgaatctgtgggcatgatttcacacttaaaaaaagtcaaaagaatggtatgatctagaggctctaaacattagcatcttaccacattttactctcattcttttttatatatacatatgagtttttgtttatatatacatatattattttctaaacttgcattttgttgtgtattgaatttttgatcatttgttaccgtttggtttgtttttgagacagaatcttactatgtagccttggctggcctggaa

SEQ ID NO: 14 - RNA, 20 nt, synthetic construct
  source 1..20: mol_type = other RNA
  modified_base 1..20: mod_base = OTHER; note = Phosphorothioate linkage
  modified_base 1..20: mod_base = OTHER; note = 2'-O-(2-methoxyethyl) ribonucleotide
  modified_base 2: mod_base = OTHER; note = 5-methyl cytidine
  modified_base 15..16: mod_base = OTHER; note = 5-methyl cytidine
  modified_base 20: mod_base = OTHER; note = 5-methyl cytidine
tctggaaaataatgcctttc

SEQ ID NO: 15 - RNA, 20 nt, synthetic construct
  source 1..20: mol_type = other RNA
  modified_base 1..20: mod_base = OTHER; note = Phosphorothioate linkage
  modified_base 1..20: mod_base = OTHER; note = 2'-O-(2-methoxyethyl) ribonucleotide
  modified_base 2: mod_base = OTHER; note = 5-methyl cytidine
  modified_base 5..6: mod_base = OTHER; note = 5-methyl cytidine
  modified_base 9: mod_base = OTHER; note = 5-methyl cytidine
  modified_base 16: mod_base = OTHER; note = 5-methyl cytidine
tcaaccgacagtgagcttat

SEQ ID NO: 16 - RNA, 20 nt, synthetic construct
  source 1..20: mol_type = other RNA
  modified_base 1..20: mod_base = OTHER; note = Phosphorothioate linkage
  modified_base 1..20: mod_base = OTHER; note = 2'-O-(2-methoxyethyl) ribonucleotide
  modified_base 9: mod_base = OTHER; note = 5-methyl cytidine
  modified_base 14..16: mod_base = OTHER; note = 5-methyl cytidine
  modified_base 20: mod_base = OTHER; note = 5-methyl cytidine
attttagtctattcccagac

SEQ ID NO: 17 - RNA, 20 nt, synthetic construct
  source 1..20: mol_type = other RNA
  modified_base 1..20: mod_base = OTHER; note = Phosphorothioate linkage
  modified_base 1..20: mod_base = OTHER; note = 2'-O-(2-methoxyethyl) ribonucleotide
  modified_base 1..2: mod_base = OTHER; note = 5-methyl cytidine
  modified_base 5..7: mod_base = OTHER; note = 5-methyl cytidine
  modified_base 11: mod_base = OTHER; note = 5-methyl cytidine
  modified_base 14..15: mod_base = OTHER; note = 5-methyl cytidine
  modified_base 20: mod_base = OTHER; note = 5-methyl cytidine
ccttccctatcagccatagc

SEQ ID NO: 18 - RNA, 20 nt, synthetic construct
  source 1..20: mol_type = other RNA
  modified_base 1..20: mod_base = OTHER; note = Phosphorothioate linkage
  modified_base 1..20: mod_base = OTHER; note = 2'-O-(2-methoxyethyl) ribonucleotide
  modified_base 2: mod_base = OTHER; note = 5-methyl cytidine
  modified_base 4..5: mod_base = OTHER; note = 5-methyl cytidine
  modified_base 18..20: mod_base = OTHER; note = 5-methyl cytidine
tcaccgtgtatttatttccc

SEQ ID NO: 19 - RNA, 20 nt, synthetic construct
  source 1..20: mol_type = other RNA
  modified_base 1..20: mod_base = OTHER; note = Phosphorothioate linkage
  modified_base 1..20: mod_base = OTHER; note = 2'-O-(2-methoxyethyl) ribonucleotide
  modified_base 1: mod_base = OTHER; note = 5-methyl cytidine
  modified_base 5: mod_base = OTHER; note = 5-methyl cytidine
  modified_base 10..11: mod_base = OTHER; note = 5-methyl cytidine
  modified_base 20: mod_base = OTHER; note = 5-methyl cytidine
cttacgtggccaatgggatc

SEQ ID NO: 20 - RNA, 20 nt, synthetic construct
  source 1..20: mol_type = other RNA
  modified_base 1..20: mod_base = OTHER; note = Phosphorothioate linkage
  modified_base 1..20: mod_base = OTHER; note = 2'-O-(2-methoxyethyl) ribonucleotide
  modified_base 5..6: mod_base = OTHER; note = 5-methyl cytidine
  modified_base 8: mod_base = OTHER; note = 5-methyl cytidine
  modified_base 20: mod_base = OTHER; note = 5-methyl cytidine
ggtgcctctgaagaaaggac

SEQ ID NO: 21 - RNA, 20 nt, synthetic construct
  source 1..20: mol_type = other RNA
  modified_base 1..20: mod_base = OTHER; note = Phosphorothioate linkage
  modified_base 1..20: mod_base = OTHER; note = 2'-O-(2-methoxyethyl) ribonucleotide
  modified_base 6..7: mod_base = OTHER; note = 5-methyl cytidine
  modified_base 9: mod_base = OTHER; note = 5-methyl cytidine
  modified_base 12..13: mod_base = OTHER; note = 5-methyl cytidine
  modified_base 15: mod_base = OTHER; note = 5-methyl cytidine
  modified_base 18: mod_base = OTHER; note = 5-methyl cytidine
ttagtcctctacctcaacgg

SEQ ID NO: 22 - RNA, 20 nt, synthetic construct
  source 1..20: mol_type = other RNA
  modified_base 1..20: mod_base = OTHER; note = Phosphorothioate linkage
  modified_base 1..20: mod_base = OTHER; note = 2'-O-(2-methoxyethyl) ribonucleotide
  modified_base 1: mod_base = OTHER; note = 5-methyl cytidine
  modified_base 5: mod_base = OTHER; note = 5-methyl cytidine
  modified_base 12: mod_base = OTHER; note = 5-methyl cytidine
  modified_base 15..16: mod_base = OTHER; note = 5-methyl cytidine
cattctgttttcttcctaag

SEQ ID NO: 23 - RNA, 20 nt, synthetic construct
  source 1..20: mol_type = other RNA
  modified_base 1..20: mod_base = OTHER; note = Phosphorothioate linkage
  modified_base 1..20: mod_base = OTHER; note = 2'-O-(2-methoxyethyl) ribonucleotide
  modified_base 5: mod_base = OTHER; note = 5-methyl cytidine
  modified_base 12: mod_base = OTHER; note = 5-methyl cytidine
gtggcagttaactttggtgt

SEQ ID NO: 24 - RNA, 20 nt, synthetic construct
  source 1..20: mol_type = other RNA
  modified_base 1..20: mod_base = OTHER; note = Phosphorothioate linkage
  modified_base 1..20: mod_base = OTHER; note = 2'-O-(2-methoxyethyl) ribonucleotide
  modified_base 1: mod_base = OTHER; note = 5-methyl cytidine
  modified_base 11: mod_base = OTHER; note = 5-methyl cytidine
  modified_base 19: mod_base = OTHER; note = 5-methyl cytidine
catttagagacaaagaatcg

SEQ ID NO: 25 - RNA, 20 nt, synthetic construct
  source 1..20: mol_type = other RNA
  modified_base 1..20: mod_base = OTHER; note = Phosphorothioate linkage
  modified_base 1..20: mod_base = OTHER; note = 2'-O-(2-methoxyethyl) ribonucleotide
  modified_base 13: mod_base = OTHER; note = 5-methyl cytidine
  modified_base 18: mod_base = OTHER; note = 5-methyl cytidine
aagaggaaagaactgtacat

SEQ ID NO: 26 - RNA, 20 nt, synthetic construct
  source 1..20: mol_type = other RNA
  modified_base 1..20: mod_base = OTHER; note = Phosphorothioate linkage
  modified_base 1..20: mod_base = OTHER; note = 2'-O-(2-methoxyethyl) ribonucleotide
  modified_base 8: mod_base = OTHER; note = 5-methyl cytidine
  modified_base 14: mod_base = OTHER; note = 5-methyl cytidine
tgttttgcttggtcaagagg

SEQ ID NO: 27 - RNA, 20 nt, synthetic construct
  source 1..20: mol_type = other RNA
  modified_base 1..20: mod_base = OTHER; note = Phosphorothioate linkage
  modified_base 1..20: mod_base = OTHER; note = 2'-O-(2-methoxyethyl) ribonucleotide
  modified_base 3: mod_base = OTHER; note = 5-methyl cytidine
  modified_base 9: mod_base = OTHER; note = 5-methyl cytidine
atcaaatactggagttgtgt

SEQ ID NO: 28 - RNA, 20 nt, synthetic construct
  source 1..20: mol_type = other RNA
  modified_base 1..20: mod_base = OTHER; note = Phosphorothioate linkage
  modified_base 1..20: mod_base = OTHER; note = 2'-O-(2-methoxyethyl) ribonucleotide
  modified_base 6..8: mod_base = OTHER; note = 5-methyl cytidine
  modified_base 15: mod_base = OTHER; note = 5-methyl cytidine
  modified_base 20: mod_base = OTHER; note = 5-methyl cytidine
aaatgcccaagtttcattgc

SEQ ID NO: 29 - RNA, 20 nt, synthetic construct
  source 1..20: mol_type = other RNA
  modified_base 1..20: mod_base = OTHER; note = Phosphorothioate linkage
  modified_base 1..20: mod_base = OTHER; note = 2'-O-(2-methoxyethyl) ribonucleotide
  modified_base 7: mod_base = OTHER; note = 5-methyl cytidine
  modified_base 10: mod_base = OTHER; note = 5-methyl cytidine
  modified_base 16..17: mod_base = OTHER; note = 5-methyl cytidine
aagatgctacaattgccata

SEQ ID NO: 30 - RNA, 20 nt, synthetic construct
  source 1..20: mol_type = other RNA
  modified_base 1..20: mod_base = OTHER; note = Phosphorothioate linkage
  modified_base 1..20: mod_base = OTHER; note = 2'-O-(2-methoxyethyl) ribonucleotide
  modified_base 12: mod_base = OTHER; note = 5-methyl cytidine
ggattaagaagctatttagg

SEQ ID NO: 31 - RNA, 20 nt, synthetic construct
  source 1..20: mol_type = other RNA
  modified_base 1..20: mod_base = OTHER; note = Phosphorothioate linkage
  modified_base 1..20: mod_base = OTHER; note = 2'-O-(2-methoxyethyl) ribonucleotide
  modified_base 9: mod_base = OTHER; note = 5-methyl cytidine
  modified_base 12: mod_base = OTHER; note = 5-methyl cytidine
gggatgactcctaaaaatgg

SEQ ID NO: 32 - RNA, 20 nt, synthetic construct
  source 1..20: mol_type = other RNA
  modified_base 1..20: mod_base = OTHER; note = Phosphorothioate linkage
  modified_base 1..20: mod_base = OTHER; note = 2'-O-(2-methoxyethyl) ribonucleotide
  modified_base 6..7: mod_base = OTHER; note = 5-methyl cytidine
  modified_base 13..14: mod_base = OTHER; note = 5-methyl cytidine
tgtttcctagtaccaagaat

SEQ ID NO: 33 - RNA, 20 nt, synthetic construct
  source 1..20: mol_type = other RNA
  modified_base 1..20: mod_base = OTHER; note = Phosphorothioate linkage
  modified_base 1..20: mod_base = OTHER; note = 2'-O-(2-methoxyethyl) ribonucleotide
  modified_base 2..5: mod_base = OTHER; note = 5-methyl cytidine
gccccttgaataatttttgt

SEQ ID NO: 34 - RNA, 20 nt, synthetic construct
  source 1..20: mol_type = other RNA
  modified_base 1..20: mod_base = OTHER; note = Phosphorothioate linkage
  modified_base 1..20: mod_base = OTHER; note = 2'-O-(2-methoxyethyl) ribonucleotide
  modified_base 1..3: mod_base = OTHER; note = 5-methyl cytidine
  modified_base 5: mod_base = OTHER; note = 5-methyl cytidine
  modified_base 7: mod_base = OTHER; note = 5-methyl cytidine
  modified_base 15: mod_base = OTHER; note = 5-methyl cytidine
  modified_base 20: mod_base = OTHER; note = 5-methyl cytidine
cccactctagattgcaagcc

SEQ ID NO: 35 - RNA, 20 nt, synthetic construct
  source 1..20: mol_type = other RNA
  modified_base 1..20: mod_base = OTHER; note = Phosphorothioate linkage
  modified_base 1..20: mod_base = OTHER; note = 2'-O-(2-methoxyethyl) ribonucleotide
  modified_base 3: mod_base = OTHER; note = 5-methyl cytidine
  modified_base 10: mod_base = OTHER; note = 5-methyl cytidine
  modified_base 13: mod_base = OTHER; note = 5-methyl cytidine
  modified_base 20: mod_base = OTHER; note = 5-methyl cytidine
gtctaggagcttctgtttac

SEQ ID NO: 36 - RNA, 20 nt, synthetic construct
  source 1..20: mol_type = other RNA
  modified_base 1..20: mod_base = OTHER; note = Phosphorothioate linkage
  modified_base 1..20: mod_base = OTHER; note = 2'-O-(2-methoxyethyl) ribonucleotide
  modified_base 5: mod_base = OTHER; note = 5-methyl cytidine
  modified_base 7: mod_base = OTHER; note = 5-methyl cytidine
  modified_base 17..18: mod_base = OTHER; note = 5-methyl cytidine
  modified_base 20: mod_base = OTHER; note = 5-methyl cytidine
ttgtctctggttgaagcctc

SEQ ID NO: 37 - RNA, 20 nt, synthetic construct
  source 1..20: mol_type = other RNA
  modified_base 1..20: mod_base = OTHER; note = Phosphorothioate linkage
  modified_base 1..20: mod_base = OTHER; note = 2'-O-(2-methoxyethyl) ribonucleotide
  modified_base 2: mod_base = OTHER; note = 5-methyl cytidine
  modified_base 7: mod_base = OTHER; note = 5-methyl cytidine
  modified_base 9: mod_base = OTHER; note = 5-methyl cytidine
  modified_base 15: mod_base = OTHER; note = 5-methyl cytidine
  modified_base 17: mod_base = OTHER; note = 5-methyl cytidine
gctgtgctctgtaacactgt

SEQ ID NO: 38 - RNA, 20 nt, synthetic construct
  source 1..20: mol_type = other RNA
  modified_base 1..20: mod_base = OTHER; note = Phosphorothioate linkage
  modified_base 1..20: mod_base = OTHER; note = 2'-O-(2-methoxyethyl) ribonucleotide
  modified_base 2..7: mod_base = OTHER; note = 5-methyl cytidine
  modified_base 9: mod_base = OTHER; note = 5-methyl cytidine
  modified_base 11..12: mod_base = OTHER; note = 5-methyl cytidine
  modified_base 19..20: mod_base = OTHER; note = 5-methyl cytidine
acccccctcaccttggttcc

SEQ ID NO: 39 - RNA, 20 nt, synthetic construct
  source 1..20: mol_type = other RNA
  modified_base 1..20: mod_base = OTHER; note = Phosphorothioate linkage
  modified_base 1..20: mod_base = OTHER; note = 2'-O-(2-methoxyethyl) ribonucleotide
  modified_base 3: mod_base = OTHER; note = 5-methyl cytidine
  modified_base 7: mod_base = OTHER; note = 5-methyl cytidine
  modified_base 9: mod_base = OTHER; note = 5-methyl cytidine
  modified_base 12..15: mod_base = OTHER; note = 5-methyl cytidine
  modified_base 17: mod_base = OTHER; note = 5-methyl cytidine
  modified_base 19: mod_base = OTHER; note = 5-methyl cytidine
ggcaacctcgtcccctcact

SEQ ID NO: 40 - RNA, 20 nt, synthetic construct
  source 1..20: mol_type = other RNA
  modified_base 1..20: mod_base = OTHER; note = Phosphorothioate linkage
  modified_base 1..20: mod_base = OTHER; note = 2'-O-(2-methoxyethyl) ribonucleotide
  modified_base 3: mod_base = OTHER; note = 5-methyl cytidine
  modified_base 15: mod_base = OTHER; note = 5-methyl cytidine
aacttatttatgagctgttg

SEQ ID NO: 41 - RNA, 20 nt, synthetic construct
  source 1..20: mol_type = other RNA
  modified_base 1..20: mod_base = OTHER; note = Phosphorothioate linkage
  modified_base 1..20: mod_base = OTHER; note = 2'-O-(2-methoxyethyl) ribonucleotide
tattaggagttagtagtggt

SEQ ID NO: 42 - RNA, 20 nt, synthetic construct
  source 1..20: mol_type = other RNA
  modified_base 1..20: mod_base = OTHER; note = Phosphorothioate linkage
  modified_base 1..20: mod_base = OTHER; note = 2'-O-(2-methoxyethyl) ribonucleotide
  modified_base 5: mod_base = OTHER; note = 5-methyl cytidine
gagacaaattatagtggtta

SEQ ID NO: 43 - RNA, 20 nt, synthetic construct
  source 1..20: mol_type = other RNA
  modified_base 1..20: mod_base = OTHER; note = Phosphorothioate linkage
  modified_base 1..20: mod_base = OTHER; note = 2'-O-(2-methoxyethyl) ribonucleotide
  modified_base 9: mod_base = OTHER; note = 5-methyl cytidine
gggaatagctttttagagat

SEQ ID NO: 44 - RNA, 20 nt, synthetic construct
  source 1..20: mol_type = other RNA
  modified_base 1..20: mod_base = OTHER; note = Phosphorothioate linkage
  modified_base 1..20: mod_base = OTHER; note = 2'-O-(2-methoxyethyl) ribonucleotide
  modified_base 7: mod_base = OTHER; note = 5-methyl cytidine
  modified_base 10: mod_base = OTHER; note = 5-methyl cytidine
atttgtcaacattttgaggg

SEQ ID NO: 45 - RNA, 20 nt, synthetic construct
  source 1..20: mol_type = other RNA
  modified_base 1..20: mod_base = OTHER; note = Phosphorothioate linkage
  modified_base 1..20: mod_base = OTHER; note = 2'-O-(2-methoxyethyl) ribonucleotide
  modified_base 2: mod_base = OTHER; note = 5-methyl cytidine
  modified_base 4: mod_base = OTHER; note = 5-methyl cytidine
  modified_base 6: mod_base = OTHER; note = 5-methyl cytidine
  modified_base 9: mod_base = OTHER; note = 5-methyl cytidine
  modified_base 13: mod_base = OTHER; note = 5-methyl cytidine
tcacacttcagactgggaat

SEQ ID NO: 46 - RNA, 20 nt, synthetic construct
  source 1..20: mol_type = other RNA
  modified_base 1..20: mod_base = OTHER; note = Phosphorothioate linkage
  modified_base 1..20: mod_base = OTHER; note = 2'-O-(2-methoxyethyl) ribonucleotide
  modified_base 7: mod_base = OTHER; note = 5-methyl cytidine
  modified_base 14: mod_base = OTHER; note = 5-methyl cytidine
  modified_base 20: mod_base = OTHER; note = 5-methyl cytidine
atattgctaatggcttgagc

SEQ ID NO: 47 - RNA, 20 nt, synthetic construct
  source 1..20: mol_type = other RNA
  modified_base 1..20: mod_base = OTHER; note = Phosphorothioate linkage
  modified_base 1..20: mod_base = OTHER; note = 2'-O-(2-methoxyethyl) ribonucleotide
  modified_base 11: mod_base = OTHER; note = 5-methyl cytidine
  modified_base 13..15: mod_base = OTHER; note = 5-methyl cytidine
  modified_base 19..20: mod_base = OTHER; note = 5-methyl cytidine
gtttttaggtcacccaagcc

SEQ ID NO: 48 - RNA, 20 nt, synthetic construct
  source 1..20: mol_type = other RNA
  modified_base 1..20: mod_base = OTHER; note = Phosphorothioate linkage
  modified_base 1..20: mod_base = OTHER; note = 2'-O-(2-methoxyethyl) ribonucleotide
  modified_base 3: mod_base = OTHER; note = 5-methyl cytidine
  modified_base 10: mod_base = OTHER; note = 5-methyl cytidine
  modified_base 17: mod_base = OTHER; note = 5-methyl cytidine
ttctaggatctaatttcagt

SEQ ID NO: 49 - RNA, 20 nt, synthetic construct
  source 1..20: mol_type = other RNA
  modified_base 1..20: mod_base = OTHER; note = Phosphorothioate linkage
  modified_base 1..20: mod_base = OTHER; note = 2'-O-(2-methoxyethyl) ribonucleotide
  modified_base 8: mod_base = OTHER; note = 5-methyl cytidine
gtggatgcatgtttagaggg

SEQ ID NO: 50 - RNA, 20 nt, synthetic construct
  source 1..20: mol_type = other RNA
  modified_base 1..20: mod_base = OTHER; note = Phosphorothioate linkage
  modified_base 1..20: mod_base = OTHER; note = 2'-O-(2-methoxyethyl) ribonucleotide
  modified_base 1: mod_base = OTHER; note = 5-methyl cytidine
  modified_base 7..9: mod_base = OTHER; note = 5-methyl cytidine
  modified_base 16: mod_base = OTHER; note = 5-methyl cytidine
cattgtcccggttttcaaaa

SEQ ID NO: 51 - RNA, 20 nt, synthetic construct
  source 1..20: mol_type = other RNA
  modified_base 1..20: mod_base = OTHER; note = Phosphorothioate linkage
  modified_base 1..20: mod_base = OTHER; note = 2'-O-(2-methoxyethyl) ribonucleotide
  modified_base 2..3: mod_base = OTHER; note = 5-methyl cytidine
  modified_base 6: mod_base = OTHER; note = 5-methyl cytidine
  modified_base 9: mod_base = OTHER; note = 5-methyl cytidine
  modified_base 13: mod_base = OTHER; note = 5-methyl cytidine
  modified_base 15: mod_base = OTHER; note = 5-methyl cytidine
  modified_base 20: mod_base = OTHER; note = 5-methyl cytidine
tccaacaccgtactcatttc

SEQ ID NO: 52 - RNA, 20 nt, synthetic construct
  source 1..20: mol_type = other RNA
  modified_base 1..20: mod_base = OTHER; note = Phosphorothioate linkage
  modified_base 1..20: mod_base = OTHER; note = 2'-O-(2-methoxyethyl) ribonucleotide
  modified_base 4: mod_base = OTHER; note = 5-methyl cytidine
  modified_base 7: mod_base = OTHER; note = 5-methyl cytidine
  modified_base 9..10: mod_base = OTHER; note = 5-methyl cytidine
  modified_base 13: mod_base = OTHER; note = 5-methyl cytidine
  modified_base 19: mod_base = OTHER; note = 5-methyl cytidine
gaactacaccgactttatct

SEQ ID NO: 53 - RNA, 20 nt, synthetic construct
  source 1..20: mol_type = other RNA
  modified_base 1..20: mod_base = OTHER; note = Phosphorothioate linkage
  modified_base 1..20: mod_base = OTHER; note = 2'-O-(2-methoxyethyl) ribonucleotide
  modified_base 8: mod_base = OTHER; note = 5-methyl cytidine
  modified_base 19: mod_base = OTHER; note = 5-methyl cytidine
ttgaaagctggtttaatgca

SEQ ID NO: 54 - RNA, 20 nt, synthetic construct
  source 1..20: mol_type = other RNA
  modified_base 1..20: mod_base = OTHER; note = Phosphorothioate linkage
  modified_base 1..20: mod_base = OTHER; note = 2'-O-(2-methoxyethyl) ribonucleotide
  modified_base 4: mod_base = OTHER; note = 5-methyl cytidine
  modified_base 6: mod_base = OTHER; note = 5-methyl cytidine
  modified_base 12: mod_base = OTHER; note = 5-methyl cytidine
  modified_base 15..17: mod_base = OTHER; note = 5-methyl cytidine
gatcacaaattctacccttg

SEQ ID NO: 55 - RNA, 20 nt, synthetic construct
  source 1..20: mol_type = other RNA
  modified_base 1..20: mod_base = OTHER; note = Phosphorothioate linkage
  modified_base 1..20: mod_base = OTHER; note = 2'-O-(2-methoxyethyl) ribonucleotide
  modified_base 6: mod_base = OTHER; note = 5-methyl cytidine
  modified_base 8: mod_base = OTHER; note = 5-methyl cytidine
  modified_base 16: mod_base = OTHER; note = 5-methyl cytidine
  modified_base 18: mod_base = OTHER; note = 5-methyl cytidine
gtttgctctgataatcacag

SEQ ID NO: 56 - RNA, 20 nt, synthetic construct
  source 1..20: mol_type = other RNA
  modified_base 1..20: mod_base = OTHER; note = Phosphorothioate linkage
  modified_base 1..20: mod_base = OTHER; note = 2'-O-(2-methoxyethyl) ribonucleotide
  modified_base 7: mod_base = OTHER; note = 5-methyl cytidine
  modified_base 12: mod_base = OTHER; note = 5-methyl cytidine
ttttaacttggctttgtgaa

SEQ ID NO: 57 - RNA, 20 nt, synthetic construct
  source 1..20: mol_type = other RNA
  modified_base 1..20: mod_base = OTHER; note = Phosphorothioate linkage
  modified_base 1..20: mod_base = OTHER; note = 2'-O-(2-methoxyethyl) ribonucleotide
  modified_base 1: mod_base = OTHER; note = 5-methyl cytidine
  modified_base 4: mod_base = OTHER; note = 5-methyl cytidine
  modified_base 6: mod_base = OTHER; note = 5-methyl cytidine
  modified_base 19..20: mod_base = OTHER; note = 5-methyl cytidine
ctgctcaaagtaaaaatacc

SEQ ID NO: 58 - RNA, 20 nt, synthetic construct
  source 1..20: mol_type = other RNA
  modified_base 1..20: mod_base = OTHER; note = Phosphorothioate linkage
  modified_base 1..20: mod_base = OTHER; note = 2'-O-(2-methoxyethyl) ribonucleotide
  modified_base 5..6: mod_base = OTHER; note = 5-methyl cytidine
atggccgaatagattgaata

SEQ ID NO: 59 - RNA, 20 nt, synthetic construct
  source 1..20: mol_type = other RNA
  modified_base 1..20: mod_base = OTHER; note = Phosphorothioate linkage
  modified_base 1..20: mod_base = OTHER; note = 2'-O-(2-methoxyethyl) ribonucleotide
  modified_base 12: mod_base = OTHER; note = 5-methyl cytidine
agagtggtgtacatgggtgt

SEQ ID NO: 60 - RNA, 20 nt, synthetic construct
  source 1..20: mol_type = other RNA
  modified_base 1..20: mod_base = OTHER; note = Phosphorothioate linkage
  modified_base 1..20: mod_base = OTHER; note = 2'-O-(2-methoxyethyl) ribonucleotide
  modified_base 1: mod_base = OTHER; note = 5-methyl cytidine
  modified_base 8: mod_base = OTHER; note = 5-methyl cytidine
  modified_base 12: mod_base = OTHER; note = 5-methyl cytidine
  modified_base 14: mod_base = OTHER; note = 5-methyl cytidine
catgtatcaatctcttagag

SEQ ID NO: 61 - RNA, 20 nt, synthetic construct
  source 1..20: mol_type = other RNA
  modified_base 1..20: mod_base = OTHER; note = Phosphorothioate linkage
  modified_base 1..20: mod_base = OTHER; note = 2'-O-(2-methoxyethyl) ribonucleotide
  modified_base 3: mod_base = OTHER; note = 5-methyl cytidine
  modified_base 6: mod_base = OTHER; note = 5-methyl cytidine
  modified_base 14: mod_base = OTHER; note = 5-methyl cytidine
  modified_base 19: mod_base = OTHER; note = 5-methyl cytidine
gtcttctttatagcaatgct

SEQ ID NO: 62 - RNA, 20 nt, synthetic construct
  source 1..20: mol_type = other RNA
  modified_base 1..20: mod_base = OTHER; note = Phosphorothioate linkage
  modified_base 1..20: mod_base = OTHER; note = 2'-O-(2-methoxyethyl) ribonucleotide
  modified_base 6: mod_base = OTHER; note = 5-methyl cytidine
  modified_base 8: mod_base = OTHER; note = 5-methyl cytidine
  modified_base 16: mod_base = OTHER; note = 5-methyl cytidine
  modified_base 20: mod_base = OTHER; note = 5-methyl cytidine
gatgactcttggttgctgtc

SEQ ID NO: 63 - RNA, 20 nt, synthetic construct
  source 1..20: mol_type = other RNA
  modified_base 1..20: mod_base = OTHER; note = Phosphorothioate linkage
  modified_base 1..20: mod_base = OTHER; note = 2'-O-(2-methoxyethyl) ribonucleotide
  modified_base 1: mod_base = OTHER; note = 5-methyl cytidine
  modified_base 3: mod_base = OTHER; note = 5-methyl cytidine
  modified_base 6: mod_base = OTHER; note = 5-methyl cytidine
  modified_base 15: mod_base = OTHER; note = 5-methyl cytidine
  modified_base 20: mod_base = OTHER; note = 5-methyl cytidine
cacaacattgtatacaatac

SEQ ID NO: 64 - RNA, 20 nt, synthetic construct
  source 1..20: mol_type = other RNA
  modified_base 1..20: mod_base = OTHER; note = Phosphorothioate linkage
  modified_base 1..20: mod_base = OTHER; note = 2'-O-(2-methoxyethyl) ribonucleotide
  modified_base 2: mod_base = OTHER; note = 5-methyl cytidine
  modified_base 6: mod_base = OTHER; note = 5-methyl cytidine
  modified_base 13: mod_base = OTHER; note = 5-methyl cytidine
acttacaggatgcattaatg

SEQ ID NO: 65 - RNA, 20 nt, synthetic construct
  source 1..20: mol_type = other RNA
  modified_base 1..20: mod_base = OTHER; note = Phosphorothioate linkage
  modified_base 1..20: mod_base = OTHER; note = 2'-O-(2-methoxyethyl) ribonucleotide
  modified_base 2: mod_base = OTHER; note = 5-methyl cytidine
  modified_base 4: mod_base = OTHER; note = 5-methyl cytidine
  modified_base 7: mod_base = OTHER; note = 5-methyl cytidine
  modified_base 12: mod_base = OTHER; note = 5-methyl cytidine
acgctacaatacttggatag

SEQ ID NO: 66 - RNA, 20 nt, synthetic construct
  source 1..20: mol_type = other RNA
  modified_base 1..20: mod_base = OTHER; note = Phosphorothioate linkage
  modified_base 1..20: mod_base = OTHER; note = 2'-O-(2-methoxyethyl) ribonucleotide
  modified_base 1: mod_base = OTHER; note = 5-methyl cytidine
  modified_base 6..7: mod_base = OTHER; note = 5-methyl cytidine
  modified_base 16: mod_base = OTHER; note = 5-methyl cytidine
  modified_base 19: mod_base = OTHER; note = 5-methyl cytidine
cttgtccagtgtaaacaacg

SEQ ID NO: 67 - RNA, 20 nt, synthetic construct
  source 1..20: mol_type = other RNA
  modified_base 1..20: mod_base = OTHER; note = Phosphorothioate linkage
  modified_base 1..20: mod_base = OTHER; note = 2'-O-(2-methoxyethyl) ribonucleotide
  modified_base 10: mod_base = OTHER; note = 5-methyl cytidine
gtggagtgtttctggtttat

SEQ ID NO: 68 - RNA, 20 nt, synthetic construct
  source 1..20: mol_type = other RNA
  modified_base 1..20: mod_base = OTHER; note = Phosphorothioate linkage
  modified_base 1..20: mod_base = OTHER; note = 2'-O-(2-methoxyethyl) ribonucleotide
  modified_base 5: mod_base = OTHER; note = 5-methyl cytidine
  modified_base 7: mod_base = OTHER; note = 5-methyl cytidine
  modified_base 11: mod_base = OTHER; note = 5-methyl cytidine
ttaactcttactttgtggag

SEQ ID NO: 69 - RNA, 20 nt, synthetic construct
  source 1..20: mol_type = other RNA
  modified_base 1..20: mod_base = OTHER; note = Phosphorothioate linkage
  modified_base 1..20: mod_base = OTHER; note = 2'-O-(2-methoxyethyl) ribonucleotide
  modified_base 4: mod_base = OTHER; note = 5-methyl cytidine
  modified_base 9: mod_base = OTHER; note = 5-methyl cytidine
  modified_base 11: mod_base = OTHER; note = 5-methyl cytidine
  modified_base 14: mod_base = OTHER; note = 5-methyl cytidine
  modified_base 19..20: mod_base = OTHER; note = 5-methyl cytidine
atacttgtctctgcaaatcc

SEQ ID NO: 70 - RNA, 20 nt, synthetic construct
  source 1..20: mol_type = other RNA
  modified_base 1..20: mod_base = OTHER; note = Phosphorothioate linkage
  modified_base 1..20: mod_base = OTHER; note = 2'-O-(2-methoxyethyl) ribonucleotide
  modified_base 2: mod_base = OTHER; note = 5-methyl cytidine
  modified_base 4: mod_base = OTHER; note = 5-methyl cytidine
  modified_base 15: mod_base = OTHER; note = 5-methyl cytidine
tcacaggtaagtaacttata

SEQ ID NO: 71 - RNA, 20 nt, synthetic construct
  source 1..20: mol_type = other RNA
  modified_base 1..20: mod_base = OTHER; note = Phosphorothioate linkage
  modified_base 1..20: mod_base = OTHER; note = 2'-O-(2-methoxyethyl) ribonucleotide
  modified_base 3: mod_base = OTHER; note = 5-methyl cytidine
  modified_base 6..7: mod_base = OTHER; note = 5-methyl cytidine
  modified_base 9: mod_base = OTHER; note = 5-methyl cytidine
  modified_base 15: mod_base = OTHER; note = 5-methyl cytidine
ggcttcctcaaattcatatt

SEQ ID NO: 72 - RNA, 20 nt, synthetic construct
  source 1..20: mol_type = other RNA
  modified_base 1..20: mod_base = OTHER; note = Phosphorothioate linkage
  modified_base 1..20: mod_base = OTHER; note = 2'-O-(2-methoxyethyl) ribonucleotide
  modified_base 4..5: mod_base = OTHER; note = 5-methyl cytidine
  modified_base 13..14: mod_base = OTHER; note = 5-methyl cytidine
  modified_base 16: mod_base = OTHER; note = 5-methyl cytidine
  modified_base 20: mod_base = OTHER; note = 5-methyl cytidine
agtccattatttcctctggc

SEQ ID NO: 73 - RNA, 20 nt, synthetic construct
  source 1..20: mol_type = other RNA
  modified_base 1..20: mod_base = OTHER; note = Phosphorothioate linkage
  modified_base 1..20: mod_base = OTHER; note = 2'-O-(2-methoxyethyl) ribonucleotide
  modified_base 5..6: mod_base = OTHER; note = 5-methyl cytidine
  modified_base 13: mod_base = OTHER; note = 5-methyl cytidine
  modified_base 15: mod_base = OTHER; note = 5-methyl cytidine
  modified_base 17..18: mod_base = OTHER; note = 5-methyl cytidine
  modified_base 20: mod_base = OTHER; note = 5-methyl cytidine
gaaaccttttaactctccac

SEQ ID NO: 74 - RNA, 20 nt, synthetic construct
  source 1..20: mol_type = other RNA
  modified_base 1..20: mod_base = OTHER; note = Phosphorothioate linkage
  modified_base 1..20: mod_base = OTHER; note = 2'-O-(2-methoxyethyl) ribonucleotide
  modified_base 1: mod_base = OTHER; note = 5-methyl cytidine
cgaggttggaaaaggttgtg

SEQ ID NO: 75 - RNA, 20 nt, synthetic construct
  source 1..20: mol_type = other RNA
  modified_base 1..20: mod_base = OTHER; note = Phosphorothioate linkage
  modified_base 1..20: mod_base = OTHER; note = 2'-O-(2-methoxyethyl) ribonucleotide
  modified_base 4: mod_base = OTHER; note = 5-methyl cytidine
  modified_base 9: mod_base = OTHER; note = 5-methyl cytidine
gttcagtgctttagaatgat

SEQ ID NO: 76 - RNA, 20 nt, synthetic construct
  source 1..20: mol_type = other RNA
  modified_base 1..20: mod_base = OTHER; note = Phosphorothioate linkage
  modified_base 1..20: mod_base = OTHER; note = 2'-O-(2-methoxyethyl) ribonucleotide
  modified_base 2: mod_base = OTHER; note = 5-methyl cytidine
  modified_base 17: mod_base = OTHER; note = 5-methyl cytidine
gcaaatagataatgttcttg

SEQ ID NO: 77 - RNA, 20 nt, synthetic construct
  source 1..20: mol_type = other RNA
  modified_base 1..20: mod_base = OTHER; note = Phosphorothioate linkage
  modified_base 1..20: mod_base = OTHER; note = 2'-O-(2-methoxyethyl) ribonucleotide
  modified_base 5: mod_base = OTHER; note = 5-methyl cytidine
  modified_base 12..13: mod_base = OTHER; note = 5-methyl cytidine
  modified_base 19: mod_base = OTHER; note = 5-methyl cytidine
gggacattgatccttaggca

SEQ ID NO: 78 - RNA, 20 nt, synthetic construct
  source 1..20: mol_type = other RNA
  modified_base 1..20: mod_base = OTHER; note = Phosphorothioate linkage
  modified_base 1..20: mod_base = OTHER; note = 2'-O-(2-methoxyethyl) ribonucleotide
  modified_base 1: mod_base = OTHER; note = 5-methyl cytidine
  modified_base 3: mod_base = OTHER; note = 5-methyl cytidine
  modified_base 10: mod_base = OTHER; note = 5-methyl cytidine
  modified_base 12: mod_base = OTHER; note = 5-methyl cytidine
  modified_base 17: mod_base = OTHER; note = 5-methyl cytidine
ctcgtatgtcactgaactgt

SEQ ID NO: 79 - RNA, 20 nt, synthetic construct
  source 1..20: mol_type = other RNA
  modified_base 1..20: mod_base = OTHER; note = Phosphorothioate linkage
  modified_base 1..20: mod_base = OTHER; note = 2'-O-(2-methoxyethyl) ribonucleotide
  modified_base 9: mod_base = OTHER; note = 5-methyl cytidine
  modified_base 11: mod_base = OTHER; note = 5-methyl cytidine
ggttattgctctgagtatgt

SEQ ID NO: 80 - RNA, 20 nt, synthetic construct
  source 1..20: mol_type = other RNA
  modified_base 1..20: mod_base = OTHER; note = Phosphorothioate linkage
  modified_base 1..20: mod_base = OTHER; note = 2'-O-(2-methoxyethyl) ribonucleotide
  modified_base 5..7: mod_base = OTHER; note = 5-methyl cytidine
  modified_base 11: mod_base = OTHER; note = 5-methyl cytidine
  modified_base 13: mod_base = OTHER; note = 5-methyl cytidine
  modified_base 15: mod_base = OTHER; note = 5-methyl cytidine
  modified_base 17: mod_base = OTHER; note = 5-methyl cytidine
gtttcccaagcacactctgt

SEQ ID NO: 81 - RNA, 20 nt, synthetic construct
  source 1..20: mol_type = other RNA
  modified_base 1..20: mod_base = OTHER; note = Phosphorothioate linkage
  modified_base 1..20: mod_base = OTHER; note = 2'-O-(2-methoxyethyl) ribonucleotide
  modified_base 2..3: mod_base = OTHER; note = 5-methyl cytidine
  modified_base 8..9: mod_base = OTHER; note = 5-methyl cytidine
  modified_base 16: mod_base = OTHER; note = 5-methyl cytidine
  modified_base 18..20: mod_base = OTHER; note = 5-methyl cytidine
tccaaggcctgttgacaccc

SEQ ID NO: 82 - RNA, 20 nt, synthetic construct
  source 1..20: mol_type = other RNA
  modified_base 1..20: mod_base = OTHER; note = Phosphorothioate linkage
  modified_base 1..20: mod_base = OTHER; note = 2'-O-(2-methoxyethyl) ribonucleotide
  modified_base 1: mod_base = OTHER; note = 5-methyl cytidine
  modified_base 3: mod_base = OTHER; note = 5-methyl cytidine
  modified_base 5: mod_base = OTHER; note = 5-methyl cytidine
  modified_base 9..10: mod_base = OTHER; note = 5-methyl cytidine
  modified_base 20: mod_base = OTHER; note = 5-methyl cytidine
ctctcgttccaaggtgaatc

SEQ ID NO: 83 - RNA, 20 nt, synthetic construct
  source 1..20: mol_type = other RNA
  modified_base 1..20: mod_base = OTHER; note = Phosphorothioate linkage
  modified_base 1..20: mod_base = OTHER; note = 2'-O-(2-methoxyethyl) ribonucleotide
  modified_base 2..4: mod_base = OTHER; note = 5-methyl cytidine
  modified_base 6: mod_base = OTHER; note = 5-methyl cytidine
  modified_base 8: mod_base = OTHER; note = 5-methyl cytidine
  modified_base 11: mod_base = OTHER; note = 5-methyl cytidine
  modified_base 13: mod_base = OTHER; note = 5-methyl cytidine
  modified_base 20: mod_base = OTHER; note = 5-methyl cytidine
gcccactctgctcaatttgc

SEQ ID NO: 84 - RNA, 20 nt, synthetic construct
  source 1..20: mol_type = other RNA
  modified_base 1..20: mod_base = OTHER; note = Phosphorothioate linkage
  modified_base 1..20: mod_base = OTHER; note = 2'-O-(2-methoxyethyl) ribonucleotide
  modified_base 11..12: mod_base = OTHER; note = 5-methyl cytidine
  modified_base 19..20: mod_base = OTHER; note = 5-methyl cytidine
gttgggatagcctgaattcc

SEQ ID NO: 85 - RNA, 20 nt, synthetic construct
  source 1..20: mol_type = other RNA
  modified_base 1..20: mod_base = OTHER; note = Phosphorothioate linkage
  modified_base 1..20: mod_base = OTHER; note = 2'-O-(2-methoxyethyl) ribonucleotide
  modified_base 2: mod_base = OTHER; note = 5-methyl cytidine
  modified_base 7: mod_base = OTHER; note = 5-methyl cytidine
  modified_base 9: mod_base = OTHER; note = 5-methyl cytidine
  modified_base 12: mod_base = OTHER; note = 5-methyl cytidine
  modified_base 15: mod_base = OTHER; note = 5-methyl cytidine
  modified_base 19..20: mod_base = OTHER; note = 5-methyl cytidine
acttttcacaactacaggcc

SEQ ID NO: 86 - RNA, 20 nt, synthetic construct
  source 1..20: mol_type = other RNA
  modified_base 1..20: mod_base = OTHER; note = Phosphorothioate linkage
  modified_base 1..20: mod_base = OTHER; note = 2'-O-(2-methoxyethyl) ribonucleotide
gggaaagtttaaaggtattt

SEQ ID NO: 87 - RNA, 20 nt, synthetic construct
  source 1..20: mol_type = other RNA
  modified_base 1..20: mod_base = OTHER; note = Phosphorothioate linkage
  modified_base 1..20: mod_base = OTHER; note = 2'-O-(2-methoxyethyl) ribonucleotide
  modified_base 2: mod_base = OTHER; note = 5-methyl cytidine
  modified_base 6: mod_base = OTHER; note = 5-methyl cytidine
gcaatcttttatattgaggg

SEQ ID NO: 88 - RNA, 20 nt, synthetic construct
  source 1..20: mol_type = other RNA
  modified_base 1..20: mod_base = OTHER; note = Phosphorothioate linkage
  modified_base 1..20: mod_base = OTHER; note = 2'-O-(2-methoxyethyl) ribonucleotide
  modified_base 3: mod_base = OTHER; note = 5-methyl cytidine
  modified_base 6: mod_base = OTHER; note = 5-methyl cytidine
  modified_base 12..13: mod_base = OTHER; note = 5-methyl cytidine
  modified_base 16: mod_base = OTHER; note = 5-methyl cytidine
  modified_base 19..20: mod_base = OTHER; note = 5-methyl cytidine
agcatctggatcctgcaacc

SEQ ID NO: 89 - RNA, 20 nt, synthetic construct
  source 1..20: mol_type = other RNA
  modified_base 1..20: mod_base = OTHER; note = Phosphorothioate linkage
  modified_base 1..20: mod_base = OTHER; note = 2'-O-(2-methoxyethyl) ribonucleotide
  modified_base 3: mod_base = OTHER; note = 5-methyl cytidine
  modified_base 5..6: mod_base = OTHER; note = 5-methyl cytidine
  modified_base 8: mod_base = OTHER; note = 5-methyl cytidine
  modified_base 13: mod_base = OTHER; note = 5-methyl cytidine
  modified_base 15: mod_base = OTHER; note = 5-methyl cytidine
gtctccacaaaactctatag

SEQ ID NO: 90 - RNA, 20 nt, synthetic construct
  source 1..20: mol_type = other RNA
  modified_base 1..20: mod_base = OTHER; note = Phosphorothioate linkage
  modified_base 1..20: mod_base = OTHER; note = 2'-O-(2-methoxyethyl) ribonucleotide
  modified_base 1: mod_base = OTHER; note = 5-methyl cytidine
  modified_base 9: mod_base = OTHER; note = 5-methyl cytidine
caaatgttcttttagggtat

SEQ ID NO: 91 - RNA, 20 nt, synthetic construct
  source 1..20: mol_type = other RNA
  modified_base 1..20: mod_base = OTHER; note = Phosphorothioate linkage
  modified_base 1..20: mod_base = OTHER; note = 2'-O-(2-methoxyethyl) ribonucleotide
  modified_base 3: mod_base = OTHER; note = 5-methyl cytidine
  modified_base 11: mod_base = OTHER; note = 5-methyl cytidine
  modified_base 16: mod_base = OTHER; note = 5-methyl cytidine
gacttttgagcaaggctgtt

SEQ ID NO: 92 - RNA, 20 nt, synthetic construct
  source 1..20: mol_type = other RNA
  modified_base 1..20: mod_base = OTHER; note = Phosphorothioate linkage
  modified_base 1..20: mod_base = OTHER; note = 2'-O-(2-methoxyethyl) ribonucleotide
  modified_base 1..2: mod_base = OTHER; note = 5-methyl cytidine
  modified_base 9: mod_base = OTHER; note = 5-methyl cytidine
  modified_base 19: mod_base = OTHER; note = 5-methyl cytidine
ccagggtgcaagagttgtct

SEQ ID NO: 93 - RNA, 20 nt, synthetic construct
  source 1..20: mol_type = other RNA
  modified_base 1..20: mod_base = OTHER; note = Phosphorothioate linkage
  modified_base 1..20: mod_base = OTHER; note = 2'-O-(2-methoxyethyl) ribonucleotide
  modified_base 4: mod_base = OTHER; note = 5-methyl cytidine
  modified_base 7: mod_base = OTHER; note = 5-methyl cytidine
  modified_base 10: mod_base = OTHER; note = 5-methyl cytidine
  modified_base 19..20: mod_base = OTHER; note = 5-methyl cytidine
gagcttcatctggtgtgtcc

SEQ ID NO: 94 - RNA, 20 nt, synthetic construct
  source 1..20: mol_type = other RNA
  modified_base 1..20: mod_base = OTHER; note = Phosphorothioate linkage
  modified_base 1..20: mod_base = OTHER; note = 2'-O-(2-methoxyethyl) ribonucleotide
  modified_base 1: mod_base = OTHER; note = 5-methyl cytidine
  modified_base 5: mod_base = OTHER; note = 5-methyl cytidine
  modified_base 8: mod_base = OTHER; note = 5-methyl cytidine
  modified_base 13: mod_base = OTHER; note = 5-methyl cytidine
  modified_base 19: mod_base = OTHER; note = 5-methyl cytidine
cgttcatctttgcttataca

SEQ ID NO: 95 - RNA, 20 nt, synthetic construct
  source 1..20: mol_type = other RNA
  modified_base 1..20: mod_base = OTHER; note = Phosphorothioate linkage
  modified_base 1..20: mod_base = OTHER; note = 2'-O-(2-methoxyethyl) ribonucleotide
  modified_base 6..7: mod_base = OTHER; note = 5-methyl cytidine
  modified_base 18: mod_base = OTHER; note = 5-methyl cytidine
ttgaacctttagaaaatcgt

SEQ ID NO: 96 - RNA, 20 nt, synthetic construct
  source 1..20: mol_type = other RNA
  modified_base 1..20: mod_base = OTHER; note = Phosphorothioate linkage
  modified_base 1..20: mod_base = OTHER; note = 2'-O-(2-methoxyethyl) ribonucleotide
  modified_base 2: mod_base = OTHER; note = 5-methyl cytidine
  modified_base 11: mod_base = OTHER; note = 5-methyl cytidine
  modified_base 13: mod_base = OTHER; note = 5-methyl cytidine
  modified_base 18..19: mod_base = OTHER; note = 5-methyl cytidine
gcttatttgactcaagacct

SEQ ID NO: 97 - RNA, 20 nt, synthetic construct
  source 1..20: mol_type = other RNA
  modified_base 1..20: mod_base = OTHER; note = Phosphorothioate linkage
  modified_base 1..20: mod_base = OTHER; note = 2'-O-(2-methoxyethyl) ribonucleotide
  modified_base 1: mod_base = OTHER; note = 5-methyl cytidine
  modified_base 4: mod_base = OTHER; note = 5-methyl cytidine
  modified_base 6: mod_base = OTHER; note = 5-methyl cytidine
cagcacaaatatattggagg

SEQ ID NO: 98 - RNA, 20 nt, synthetic construct
  source 1..20: mol_type = other RNA
  modified_base 1..20: mod_base = OTHER; note = Phosphorothioate linkage
  modified_base 1..20: mod_base = OTHER; note = 2'-O-(2-methoxyethyl) ribonucleotide
  modified_base 5: mod_base = OTHER; note = 5-methyl cytidine
  modified_base 7: mod_base = OTHER; note = 5-methyl cytidine
gattcacaagaagggagagg

SEQ ID NO: 99 - RNA, 20 nt, synthetic construct
  source 1..20: mol_type = other RNA
  modified_base 1..20: mod_base = OTHER; note = Phosphorothioate linkage
  modified_base 1..20: mod_base = OTHER; note = 2'-O-(2-methoxyethyl) ribonucleotide
  modified_base 6: mod_base = OTHER; note = 5-methyl cytidine
  modified_base 8: mod_base = OTHER; note = 5-methyl cytidine
  modified_base 12: mod_base = OTHER; note = 5-methyl cytidine
gtaagctcaggcaaaggaga

SEQ ID NO: 100 - RNA, 20 nt, synthetic construct
  source 1..20: mol_type = other RNA
  modified_base 1..20: mod_base = OTHER; note = Phosphorothioate linkage
  modified_base 1..20: mod_base = OTHER; note = 2'-O-(2-methoxyethyl) ribonucleotide
  modified_base 12: mod_base = OTHER; note = 5-methyl cytidine
ggagtgagaggcatttaggg

SEQ ID NO: 101 - RNA, 20 nt, synthetic construct
  source 1..20: mol_type = other RNA
  modified_base 1..20: mod_base = OTHER; note = Phosphorothioate linkage
  modified_base 1..20: mod_base = OTHER; note = 2'-O-(2-methoxyethyl) ribonucleotide
  modified_base 4: mod_base = OTHER; note = 5-methyl cytidine
  modified_base 9: mod_base = OTHER; note = 5-methyl cytidine
  modified_base 16: mod_base = OTHER; note = 5-methyl cytidine
attcattgctgaaggctgga

SEQ ID NO: 102 - RNA, 20 nt, synthetic construct
  source 1..20: mol_type = other RNA
  modified_base 1..20: mod_base = OTHER; note = Phosphorothioate linkage
  modified_base 1..20: mod_base = OTHER; note = 2'-O-(2-methoxyethyl) ribonucleotide
  modified_base 3..4: mod_base = OTHER; note = 5-methyl cytidine
  modified_base 12..13: mod_base = OTHER; note = 5-methyl cytidine
gaccaatgttgcctattatt

SEQ ID NO: 103 - RNA, 20 nt, synthetic construct
  source 1..20: mol_type = other RNA
  modified_base 1..20: mod_base = OTHER; note = Phosphorothioate linkage
  modified_base 1..20: mod_base = OTHER; note = 2'-O-(2-methoxyethyl) ribonucleotide
  modified_base 2: mod_base = OTHER; note = 5-methyl cytidine
  modified_base 4..6: mod_base = OTHER; note = 5-methyl cytidine
  modified_base 9..10: mod_base = OTHER; note = 5-methyl cytidine
  modified_base 15: mod_base = OTHER; note = 5-methyl cytidine
  modified_base 20: mod_base = OTHER; note = 5-methyl cytidine
gcacccaaccaagtcttgac

SEQ ID NO: 104 - RNA, 20 nt, synthetic construct
  source 1..20: mol_type = other RNA
  modified_base 1..20: mod_base = OTHER; note = Phosphorothioate linkage
  modified_base 1..20: mod_base = OTHER; note = 2'-O-(2-methoxyethyl) ribonucleotide
  modified_base 1..2: mod_base = OTHER; note = 5-methyl cytidine
  modified_base 13: mod_base = OTHER; note = 5-methyl cytidine
  modified_base 18: mod_base = OTHER; note = 5-methyl cytidine
cctgagattgagctatactg

SEQ ID NO: 105 - RNA, 20 nt, synthetic construct
  source 1..20: mol_type = other RNA
  modified_base 1..20: mod_base = OTHER; note = Phosphorothioate linkage
  modified_base 1..20: mod_base = OTHER; note = 2'-O-(2-methoxyethyl) ribonucleotide
  modified_base 1: mod_base = OTHER; note = 5-methyl cytidine
  modified_base 4: mod_base = OTHER; note = 5-methyl cytidine
  modified_base 6: mod_base = OTHER; note = 5-methyl cytidine
  modified_base 14: mod_base = OTHER; note = 5-methyl cytidine
  modified_base 16: mod_base = OTHER; note = 5-methyl cytidine
catctctgtgaatcgctagt

SEQ ID NO: 106 - RNA, 20 nt, synthetic construct
  source 1..20: mol_type = other RNA
  modified_base 1..20: mod_base = OTHER; note = Phosphorothioate linkage
  modified_base 1..20: mod_base = OTHER; note = 2'-O-(2-methoxyethyl) ribonucleotide
  modified_base 4: mod_base = OTHER; note = 5-methyl cytidine
  modified_base 20: mod_base = OTHER; note = 5-methyl cytidine
taactgggagtatagaggac

SEQ ID NO: 107 - RNA, 20 nt, synthetic construct
  source 1..20: mol_type = other RNA
  modified_base 1..20: mod_base = OTHER; note = Phosphorothioate linkage
  modified_base 1..20: mod_base = OTHER; note = 2'-O-(2-methoxyethyl) ribonucleotide
  modified_base 2: mod_base = OTHER; note = 5-methyl cytidine
  modified_base 4: mod_base = OTHER; note = 5-methyl cytidine
  modified_base 20: mod_base = OTHER; note = 5-methyl cytidine
tcacaaatagattgagggtc

SEQ ID NO: 108 - RNA, 20 nt, synthetic construct
  source 1..20: mol_type = other RNA
  modified_base 1..20: mod_base = OTHER; note = Phosphorothioate linkage
  modified_base 1..20: mod_base = OTHER; note = 2'-O-(2-methoxyethyl) ribonucleotide
  modified_base 2: mod_base = OTHER; note = 5-methyl cytidine
  modified_base 7..8: mod_base = OTHER; note = 5-methyl cytidine
  modified_base 11..12: mod_base = OTHER; note = 5-methyl cytidine
  modified_base 14: mod_base = OTHER; note = 5-methyl cytidine
  modified_base 17: mod_base = OTHER; note = 5-methyl cytidine
  modified_base 20: mod_base = OTHER; note = 5-methyl cytidine
gctaatccaaccacttcaac

SEQ ID NO: 109 - RNA, 20 nt, synthetic construct
  source 1..20: mol_type = other RNA
  modified_base 1..20: mod_base = OTHER; note = Phosphorothioate linkage
  modified_base 1..20: mod_base = OTHER; note = 2'-O-(2-methoxyethyl) ribonucleotide
  modified_base 3: mod_base = OTHER; note = 5-methyl cytidine
  modified_base 9..12: mod_base = OTHER; note = 5-methyl cytidine
gtcaagatccccgaagttga

SEQ ID NO: 110 - RNA, 20 nt, synthetic construct
  source 1..20: mol_type = other RNA
  modified_base 1..20: mod_base = OTHER; note = Phosphorothioate linkage
  modified_base 1..20: mod_base = OTHER; note = 2'-O-(2-methoxyethyl) ribonucleotide
  modified_base 4: mod_base = OTHER; note = 5-methyl cytidine
  modified_base 7: mod_base = OTHER; note = 5-methyl cytidine
  modified_base 12: mod_base = OTHER; note = 5-methyl cytidine
  modified_base 14: mod_base = OTHER; note = 5-methyl cytidine
ggactgcgtgactcaggtta

SEQ ID NO: 111 - RNA, 20 nt, synthetic construct
  source 1..20: mol_type = other RNA
  modified_base 1..20: mod_base = OTHER; note = Phosphorothioate linkage
  modified_base 1..20: mod_base = OTHER; note = 2'-O-(2-methoxyethyl) ribonucleotide
  modified_base 2: mod_base = OTHER; note = 5-methyl cytidine
  modified_base 8..9: mod_base = OTHER; note = 5-methyl cytidine
  modified_base 20: mod_base = OTHER; note = 5-methyl cytidine
gcaaggtccagggtgtattc

SEQ ID NO: 112 - RNA, 20 nt, synthetic construct
  source 1..20: mol_type = other RNA
  modified_base 1..20: mod_base = OTHER; note = Phosphorothioate linkage
  modified_base 1..20: mod_base = OTHER; note = 2'-O-(2-methoxyethyl) ribonucleotide
  modified_base 3: mod_base = OTHER; note = 5-methyl cytidine
  modified_base 8: mod_base = OTHER; note = 5-methyl cytidine
  modified_base 12: mod_base = OTHER; note = 5-methyl cytidine
  modified_base 20: mod_base = OTHER; note = 5-methyl cytidine
aacatgtcagacagtagttc

SEQ ID NO: 113 - RNA, 20 nt, synthetic construct
  source 1..20: mol_type = other RNA
  modified_base 1..20: mod_base = OTHER; note = Phosphorothioate linkage
  modified_base 1..20: mod_base = OTHER; note = 2'-O-(2-methoxyethyl) ribonucleotide
  modified_base 1: mod_base = OTHER; note = 5-methyl cytidine
  modified_base 3: mod_base = OTHER; note = 5-methyl cytidine
  modified_base 10..11: mod_base = OTHER; note = 5-methyl cytidine
cacagagtgccaaggagtta

SEQ ID NO: 114 - RNA, 20 nt, synthetic construct
  source 1..20: mol_type = other RNA
  modified_base 1..20: mod_base = OTHER; note = Phosphorothioate linkage
  modified_base 1..20: mod_base = OTHER; note = 2'-O-(2-methoxyethyl) ribonucleotide
  modified_base 1: mod_base = OTHER; note = 5-methyl cytidine
  modified_base 16: mod_base = OTHER; note = 5-methyl cytidine
cgagaaaatgaggtacatgg

SEQ ID NO: 115 - RNA, 20 nt, synthetic construct
  source 1..20: mol_type = other RNA
  modified_base 1..20: mod_base = OTHER; note = Phosphorothioate linkage
  modified_base 1..20: mod_base = OTHER; note = 2'-O-(2-methoxyethyl) ribonucleotide
  modified_base 9: mod_base = OTHER; note = 5-methyl cytidine
gaggttgacaaataggtgtg

SEQ ID NO: 116 - RNA, 20 nt, synthetic construct
  source 1..20: mol_type = other RNA
  modified_base 1..20: mod_base = OTHER; note = Phosphorothioate linkage
  modified_base 1..20: mod_base = OTHER; note = 2'-O-(2-methoxyethyl) ribonucleotide
  modified_base 12: mod_base = OTHER; note = 5-methyl cytidine
  modified_base 15: mod_base = OTHER; note = 5-methyl cytidine
  modified_base 20: mod_base = OTHER; note = 5-methyl cytidine
gatttaaaggactgcatggc

SEQ ID NO: 117 - RNA, 20 nt, synthetic construct
  source 1..20: mol_type = other RNA
  modified_base 1..20: mod_base = OTHER; note = Phosphorothioate linkage
  modified_base 1..20: mod_base = OTHER; note = 2'-O-(2-methoxyethyl) ribonucleotide
  modified_base 18: mod_base = OTHER; note = 5-methyl cytidine
atggtgagagtgtggttcaa

SEQ ID NO: 118 - RNA, 20 nt, synthetic construct
  source 1..20: mol_type = other RNA
  modified_base 1..20: mod_base = OTHER; note = Phosphorothioate linkage
  modified_base 1..20: mod_base = OTHER; note = 2'-O-(2-methoxyethyl) ribonucleotide
  modified_base 2: mod_base = OTHER; note = 5-methyl cytidine
  modified_base 16: mod_base = OTHER; note = 5-methyl cytidine
gcaggatgaagtttacaagg

SEQ ID NO: 119 - RNA, 20 nt, synthetic construct
  source 1..20: mol_type = other RNA
  modified_base 1..20: mod_base = OTHER; note = Phosphorothioate linkage
  modified_base 1..20: mod_base = OTHER; note = 2'-O-(2-methoxyethyl) ribonucleotide
  modified_base 7..8: mod_base = OTHER; note = 5-methyl cytidine
  modified_base 12: mod_base = OTHER; note = 5-methyl cytidine
  modified_base 14: mod_base = OTHER; note = 5-methyl cytidine
tggtatccattcacaaggtg

SEQ ID NO: 120 - RNA, 20 nt, synthetic construct
  source 1..20: mol_type = other RNA
  modified_base 1..20: mod_base = OTHER; note = Phosphorothioate linkage
  modified_base 1..20: mod_base = OTHER; note = 2'-O-(2-methoxyethyl) ribonucleotide
  modified_base 4: mod_base = OTHER; note = 5-methyl cytidine
  modified_base 9: mod_base = OTHER; note = 5-methyl cytidine
  modified_base 11: mod_base = OTHER; note = 5-methyl cytidine
  modified_base 14..15: mod_base = OTHER; note = 5-methyl cytidine
gtactagactctgcctgtgt

SEQ ID NO: 121 - RNA, 20 nt, synthetic construct
  source 1..20: mol_type = other RNA
  modified_base 1..20: mod_base = OTHER; note = Phosphorothioate linkage
  modified_base 1..20: mod_base = OTHER; note = 2'-O-(2-methoxyethyl) ribonucleotide
  modified_base 12: mod_base = OTHER; note = 5-methyl cytidine
ggtgttgagaactagaatat

SEQ ID NO: 122 - RNA, 20 nt, synthetic construct
  source 1..20: mol_type = other RNA
  modified_base 1..20: mod_base = OTHER; note = Phosphorothioate linkage
  modified_base 1..20: mod_base = OTHER; note = 2'-O-(2-methoxyethyl) ribonucleotide
  modified_base 3..5: mod_base = OTHER; note = 5-methyl cytidine
  modified_base 14..15: mod_base = OTHER; note = 5-methyl cytidine
gtccctgtggttacctaaag

SEQ ID NO: 123 - RNA, 20 nt, synthetic construct
  source 1..20: mol_type = other RNA
  modified_base 1..20: mod_base = OTHER; note = Phosphorothioate linkage
  modified_base 1..20: mod_base = OTHER; note = 2'-O-(2-methoxyethyl) ribonucleotide
  modified_base 10: mod_base = OTHER; note = 5-methyl cytidine
  modified_base 14: mod_base = OTHER; note = 5-methyl cytidine
aaggaaggtctagcggaggt

SEQ ID NO: 124 - RNA, 20 nt, synthetic construct
  source 1..20: mol_type = other RNA
  modified_base 1..20: mod_base = OTHER; note = Phosphorothioate linkage
  modified_base 1..20: mod_base = OTHER; note = 2'-O-(2-methoxyethyl) ribonucleotide
  modified_base 4: mod_base = OTHER; note = 5-methyl cytidine
  modified_base 10..11: mod_base = OTHER; note = 5-methyl cytidine
  modified_base 15: mod_base = OTHER; note = 5-methyl cytidine
  modified_base 20: mod_base = OTHER; note = 5-methyl cytidine
agactttggccaggcaagac

SEQ ID NO: 125 - RNA, 20 nt, synthetic construct
  source 1..20: mol_type = other RNA
  modified_base 1..20: mod_base = OTHER; note = Phosphorothioate linkage
  modified_base 1..20: mod_base = OTHER; note = 2'-O-(2-methoxyethyl) ribonucleotide
  modified_base 2: mod_base = OTHER; note = 5-methyl cytidine
  modified_base 10: mod_base = OTHER; note = 5-methyl cytidine
gcatggtagctagtgataat

SEQ ID NO: 126 - RNA, 20 nt, synthetic construct
  source 1..20: mol_type = other RNA
  modified_base 1..20: mod_base = OTHER; note = Phosphorothioate linkage
  modified_base 1..20: mod_base = OTHER; note = 2'-O-(2-methoxyethyl) ribonucleotide
  modified_base 10..12: mod_base = OTHER; note = 5-methyl cytidine
aaatgttggcccttgaggag

SEQ ID NO: 127 - RNA, 20 nt, synthetic construct
  source 1..20: mol_type = other RNA
  modified_base 1..20: mod_base = OTHER; note = Phosphorothioate linkage
  modified_base 1..20: mod_base = OTHER; note = 2'-O-(2-methoxyethyl) ribonucleotide
  modified_base 11: mod_base = OTHER; note = 5-methyl cytidine
  modified_base 14: mod_base = OTHER; note = 5-methyl cytidine
attgtaggtgctgcgggtat

SEQ ID NO: 128 - RNA, 20 nt, synthetic construct
  source 1..20: mol_type = other RNA
  modified_base 1..20: mod_base = OTHER; note = Phosphorothioate linkage
  modified_base 1..20: mod_base = OTHER; note = 2'-O-(2-methoxyethyl) ribonucleotide
  modified_base 5: mod_base = OTHER; note = 5-methyl cytidine
  modified_base 16: mod_base = OTHER; note = 5-methyl cytidine
  modified_base 20: mod_base = OTHER; note = 5-methyl cytidine
gtgtctatttggtatcagac

SEQ ID NO: 129 - RNA, 20 nt, synthetic construct
  source 1..20: mol_type = other RNA
  modified_base 1..20: mod_base = OTHER; note = Phosphorothioate linkage
  modified_base 1..20: mod_base = OTHER; note = 2'-O-(2-methoxyethyl) ribonucleotide
  modified_base 4: mod_base = OTHER; note = 5-methyl cytidine
  modified_base 6: mod_base = OTHER; note = 5-methyl cytidine
  modified_base 8: mod_base = OTHER; note = 5-methyl cytidine
  modified_base 12: mod_base = OTHER; note = 5-methyl cytidine
  modified_base 14: mod_base = OTHER; note = 5-methyl cytidine
  modified_base 16..17: mod_base = OTHER; note = 5-methyl cytidine
gagcacacattcactccatt

SEQ ID NO: 130 - RNA, 20 nt, synthetic construct
  source 1..20: mol_type = other RNA
  modified_base 1..20: mod_base = OTHER; note = Phosphorothioate linkage
  modified_base 1..20: mod_base = OTHER; note = 2'-O-(2-methoxyethyl) ribonucleotide
  modified_base 3: mod_base = OTHER; note = 5-methyl cytidine
  modified_base 8: mod_base = OTHER; note = 5-methyl cytidine
  modified_base 17: mod_base = OTHER; note = 5-methyl cytidine
tgcattgcatgttgagctgg

SEQ ID NO: 131 - RNA, 20 nt, synthetic construct
  source 1..20: mol_type = other RNA
  modified_base 1..20: mod_base = OTHER; note = Phosphorothioate linkage
  modified_base 1..20: mod_base = OTHER; note = 2'-O-(2-methoxyethyl) ribonucleotide
  modified_base 13: mod_base = OTHER; note = 5-methyl cytidine
  modified_base 17..18: mod_base = OTHER; note = 5-methyl cytidine
  modified_base 20: mod_base = OTHER; note = 5-methyl cytidine
gaagaatgggagcaatccgc

SEQ ID NO: 132 - RNA, 20 nt, synthetic construct
  source 1..20: mol_type = other RNA
gtaggaagttgaatgagttg

SEQ ID NO: 133 - RNA, 20 nt, synthetic construct
  source 1..20: mol_type = other RNA
  modified_base 1..20: mod_base = OTHER; note = Phosphorothioate linkage
  modified_base 1..20: mod_base = OTHER; note = 2'-O-(2-methoxyethyl) ribonucleotide
  modified_base 18: mod_base = OTHER; note = 5-methyl cytidine
tggatgtagatgaatggcaa

SEQ ID NO: 134 - RNA, 20 nt, synthetic construct
  source 1..20: mol_type = other RNA
  modified_base 1..20: mod_base = OTHER; note = Phosphorothioate linkage
  modified_base 1..20: mod_base = OTHER; note = 2'-O-(2-methoxyethyl) ribonucleotide
  modified_base 2..3: mod_base = OTHER; note = 5-methyl cytidine
  modified_base 5: mod_base = OTHER; note = 5-methyl cytidine
  modified_base 7: mod_base = OTHER; note = 5-methyl cytidine
  modified_base 12: mod_base = OTHER; note = 5-methyl cytidine
  modified_base 19: mod_base = OTHER; note = 5-methyl cytidine
gccacacgtttcttattgcg

SEQ ID NO: 135 - RNA, 20 nt, synthetic construct
  source 1..20: mol_type = other RNA
  modified_base 1..20: mod_base = OTHER; note = Phosphorothioate linkage
  modified_base 1..20: mod_base = OTHER; note = 2'-O-(2-methoxyethyl) ribonucleotide
  modified_base 20: mod_base = OTHER; note = 5-methyl cytidine
gtgggagtggtaagattagc

SEQ ID NO: 136 - RNA, 20 nt, synthetic construct
  source 1..20: mol_type = other RNA
  modified_base 1..20: mod_base = OTHER; note = Phosphorothioate linkage
  modified_base 1..20: mod_base = OTHER; note = 2'-O-(2-methoxyethyl) ribonucleotide
  modified_base 3: mod_base = OTHER; note = 5-methyl cytidine
aacggaagggttaaaggtat

SEQ ID NO: 137 - RNA, 20 nt, synthetic construct
  source 1..20: mol_type = other RNA
  modified_base 1..20: mod_base = OTHER; note = Phosphorothioate linkage
  modified_base 1..20: mod_base = OTHER; note = 2'-O-(2-methoxyethyl) ribonucleotide
  modified_base 7: mod_base = OTHER; note = 5-methyl cytidine
  modified_base 10: mod_base = OTHER; note = 5-methyl cytidine
  modified_base 20: mod_base = OTHER; note = 5-methyl cytidine
gtgaggcatcaggtaagttc

SEQ ID NO: 138 - RNA, 20 nt, synthetic construct
  source 1..20: mol_type = other RNA
  modified_base 1..20: mod_base = OTHER; note = Phosphorothioate linkage
  modified_base 1..20: mod_base = OTHER; note = 2'-O-(2-methoxyethyl) ribonucleotide
  modified_base 2: mod_base = OTHER; note = 5-methyl cytidine
  modified_base 18: mod_base = OTHER; note = 5-methyl cytidine
gcgggattagatgaggtcta

SEQ ID NO: 139 - RNA, 20 nt, synthetic construct
  source 1..20: mol_type = other RNA
  modified_base 1..20: mod_base = OTHER; note = Phosphorothioate linkage
  modified_base 1..20: mod_base = OTHER; note = 2'-O-(2-methoxyethyl) ribonucleotide
  modified_base 2..4: mod_base = OTHER; note = 5-methyl cytidine
  modified_base 18: mod_base = OTHER; note = 5-methyl cytidine
gcccaaatgaggtgatacaa

SEQ ID NO: 140 - RNA, 20 nt, synthetic construct
  source 1..20: mol_type = other RNA
  modified_base 1..20: mod_base = OTHER; note = Phosphorothioate linkage
  modified_base 1..20: mod_base = OTHER; note = 2'-O-(2-methoxyethyl) ribonucleotide
  modified_base 5: mod_base = OTHER; note = 5-methyl cytidine
  modified_base 13: mod_base = OTHER; note = 5-methyl cytidine
  modified_base 15..17: mod_base = OTHER; note = 5-methyl cytidine
  modified_base 20: mod_base = OTHER; note = 5-methyl cytidine
atgacatgatagcacccaac

SEQ ID NO: 141 - RNA, 20 nt, synthetic construct
  source 1..20: mol_type = other RNA
  modified_base 1..20: mod_base = OTHER; note = Phosphorothioate linkage
  modified_base 1..20: mod_base = OTHER; note = 2'-O-(2-methoxyethyl) ribonucleotide
  modified_base 1: mod_base = OTHER; note = 5-methyl cytidine
  modified_base 19..20: mod_base = OTHER; note = 5-methyl cytidine
cttaggaggattatttaacc

SEQ ID NO: 142 - RNA, 20 nt, synthetic construct
  source 1..20: mol_type = other RNA
  modified_base 1..20: mod_base = OTHER; note = Phosphorothioate linkage
  modified_base 1..20: mod_base = OTHER; note = 2'-O-(2-methoxyethyl) ribonucleotide
  modified_base 1: mod_base = OTHER; note = 5-methyl cytidine
  modified_base 4: mod_base = OTHER; note = 5-methyl cytidine
  modified_base 14: mod_base = OTHER; note = 5-methyl cytidine
  modified_base 16..17: mod_base = OTHER; note = 5-methyl cytidine
ctactagttgttacacctta

SEQ ID NO: 143 - RNA, 20 nt, synthetic construct
  source 1..20: mol_type = other RNA
  modified_base 1..20: mod_base = OTHER; note = Phosphorothioate linkage
  modified_base 1..20: mod_base = OTHER; note = 2'-O-(2-methoxyethyl) ribonucleotide
  modified_base 4: mod_base = OTHER; note = 5-methyl cytidine
  modified_base 8: mod_base = OTHER; note = 5-methyl cytidine
  modified_base 15: mod_base = OTHER; note = 5-methyl cytidine
  modified_base 18: mod_base = OTHER; note = 5-methyl cytidine
  modified_base 20: mod_base = OTHER; note = 5-methyl cytidine
agactggcatgtggcttcac

SEQ ID NO: 144 - RNA, 20 nt, synthetic construct
  source 1..20: mol_type = other RNA
  modified_base 1..20: mod_base = OTHER; note = Phosphorothioate linkage
  modified_base 1..20: mod_base = OTHER; note = 2'-O-(2-methoxyethyl) ribonucleotide
  modified_base 14: mod_base = OTHER; note = 5-methyl cytidine
  modified_base 16: mod_base = OTHER; note = 5-methyl cytidine
  modified_base 20: mod_base = OTHER; note = 5-methyl cytidine
ggaagaaggttagcacagac

SEQ ID NO: 145 - RNA, 20 nt, synthetic construct
  source 1..20: mol_type = other RNA
  modified_base 1..20: mod_base = OTHER; note = Phosphorothioate linkage
  modified_base 1..20: mod_base = OTHER; note = 2'-O-(2-methoxyethyl) ribonucleotide
  modified_base 2: mod_base = OTHER; note = 5-methyl cytidine
  modified_base 7: mod_base = OTHER; note = 5-methyl cytidine
  modified_base 12: mod_base = OTHER; note = 5-methyl cytidine
  modified_base 14: mod_base = OTHER; note = 5-methyl cytidine
gcatttcagagcacagagtg

SEQ ID NO: 146 - RNA, 20 nt, synthetic construct
  source 1..20: mol_type = other RNA
  modified_base 1..20: mod_base = OTHER; note = Phosphorothioate linkage
  modified_base 1..20: mod_base = OTHER; note = 2'-O-(2-methoxyethyl) ribonucleotide
  modified_base 1: mod_base = OTHER; note = 5-methyl cytidine
  modified_base 3: mod_base = OTHER; note = 5-methyl cytidine
  modified_base 7..9: mod_base = OTHER; note = 5-methyl cytidine
  modified_base 12: mod_base = OTHER; note = 5-methyl cytidine
  modified_base 18: mod_base = OTHER; note = 5-methyl cytidine
cactggcccatcaattgcat

SEQ ID NO: 147 - RNA, 20 nt, synthetic construct
  source 1..20: mol_type = other RNA
  modified_base 1..20: mod_base = OTHER; note = Phosphorothioate linkage
  modified_base 1..20: mod_base = OTHER; note = 2'-O-(2-methoxyethyl) ribonucleotide
  modified_base 2: mod_base = OTHER; note = 5-methyl cytidine
  modified_base 5: mod_base = OTHER; note = 5-methyl cytidine
  modified_base 17: mod_base = OTHER; note = 5-methyl cytidine
  modified_base 19: mod_base = OTHER; note = 5-methyl cytidine
tctgcaaattaagaagcact

SEQ ID NO: 148 - RNA, 20 nt, synthetic construct
  source 1..20: mol_type = other RNA
  modified_base 1..20: mod_base = OTHER; note = Phosphorothioate linkage
  modified_base 1..20: mod_base = OTHER; note = 2'-O-(2-methoxyethyl) ribonucleotide
  modified_base 1: mod_base = OTHER; note = 5-methyl cytidine
  modified_base 9..10: mod_base = OTHER; note = 5-methyl cytidine
cagagaaacctaaaattgag

SEQ ID NO: 149 - RNA, 20 nt, synthetic construct
  source 1..20: mol_type = other RNA
  modified_base 1..20: mod_base = OTHER; note = Phosphorothioate linkage
  modified_base 1..20: mod_base = OTHER; note = 2'-O-(2-methoxyethyl) ribonucleotide
  modified_base 2..4: mod_base = OTHER; note = 5-methyl cytidine
  modified_base 6: mod_base = OTHER; note = 5-methyl cytidine
  modified_base 16: mod_base = OTHER; note = 5-methyl cytidine
  modified_base 18: mod_base = OTHER; note = 5-methyl cytidine
  modified_base 20: mod_base = OTHER; note = 5-methyl cytidine
acccacatagttgtactctc

SEQ ID NO: 150 - RNA, 20 nt, synthetic construct
  source 1..20: mol_type = other RNA
  modified_base 1..20: mod_base = OTHER; note = Phosphorothioate linkage
  modified_base 1..20: mod_base = OTHER; note = 2'-O-(2-methoxyethyl) ribonucleotide
  modified_base 2: mod_base = OTHER; note = 5-methyl cytidine
  modified_base 12..13: mod_base = OTHER; note = 5-methyl cytidine
  modified_base 20: mod_base = OTHER; note = 5-methyl cytidine
gcttgtgatgtccagatgac

SEQ ID NO: 151 - RNA, 20 nt, synthetic construct
  source 1..20: mol_type = other RNA
  modified_base 1..20: mod_base = OTHER; note = Phosphorothioate linkage
  modified_base 1..20: mod_base = OTHER; note = 2'-O-(2-methoxyethyl) ribonucleotide
  modified_base 4: mod_base = OTHER; note = 5-methyl cytidine
  modified_base 7: mod_base = OTHER; note = 5-methyl cytidine
  modified_base 13..14: mod_base = OTHER; note = 5-methyl cytidine
  modified_base 19: mod_base = OTHER; note = 5-methyl cytidine
gagcatcaggtaccatgaca

SEQ ID NO: 152 - RNA, 20 nt, synthetic construct
  source 1..20: mol_type = other RNA
  modified_base 1..20: mod_base = OTHER; note = Phosphorothioate linkage
  modified_base 1..20: mod_base = OTHER; note = 2'-O-(2-methoxyethyl) ribonucleotide
  modified_base 1: mod_base = OTHER; note = 5-methyl cytidine
  modified_base 17: mod_base = OTHER; note = 5-methyl cytidine
  modified_base 20: mod_base = OTHER; note = 5-methyl cytidine
ctgggatagggtggatctac

SEQ ID NO: 153 - RNA, 20 nt, synthetic construct
  source 1..20: mol_type = other RNA
  modified_base 1..20: mod_base = OTHER; note = Phosphorothioate linkage
  modified_base 1..20: mod_base = OTHER; note = 2'-O-(2-methoxyethyl) ribonucleotide
  modified_base 7: mod_base = OTHER; note = 5-methyl cytidine
  modified_base 11: mod_base = OTHER; note = 5-methyl cytidine
  modified_base 16: mod_base = OTHER; note = 5-methyl cytidine
  modified_base 18: mod_base = OTHER; note = 5-methyl cytidine
gtggagcaaactaggcactg

SEQ ID NO: 154 - RNA, 20 nt, synthetic construct
  source 1..20: mol_type = other RNA
  modified_base 1..20: mod_base = OTHER; note = Phosphorothioate linkage
  modified_base 1..20: mod_base = OTHER; note = 2'-O-(2-methoxyethyl) ribonucleotide
  modified_base 4..6: mod_base = OTHER; note = 5-methyl cytidine
  modified_base 9..11: mod_base = OTHER; note = 5-methyl cytidine
  modified_base 15: mod_base = OTHER; note = 5-methyl cytidine
gagccctacccagacatgat

SEQ ID NO: 155 - RNA, 20 nt, synthetic construct
  source 1..20: mol_type = other RNA
  modified_base 1..20: mod_base = OTHER; note = Phosphorothioate linkage
  modified_base 1..20: mod_base = OTHER; note = 2'-O-(2-methoxyethyl) ribonucleotide
  modified_base 8..10: mod_base = OTHER; note = 5-methyl cytidine
  modified_base 12: mod_base = OTHER; note = 5-methyl cytidine
taaatggcccacaagtgagg

SEQ ID NO: 156 - RNA, 20 nt, synthetic construct
  source 1..20: mol_type = other RNA
  modified_base 1..20: mod_base = OTHER; note = Phosphorothioate linkage
  modified_base 1..20: mod_base = OTHER; note = 2'-O-(2-methoxyethyl) ribonucleotide
  modified_base 18..20: mod_base = OTHER; note = 5-methyl cytidine
atgaagtgttgtatgtgccc

SEQ ID NO: 157 - RNA, 20 nt, synthetic construct
  source 1..20: mol_type = other RNA
  modified_base 1..20: mod_base = OTHER; note = Phosphorothioate linkage
  modified_base 1..20: mod_base = OTHER; note = 2'-O-(2-methoxyethyl) ribonucleotide
  modified_base 2: mod_base = OTHER; note = 5-methyl cytidine
  modified_base 6: mod_base = OTHER; note = 5-methyl cytidine
  modified_base 9..10: mod_base = OTHER; note = 5-methyl cytidine
  modified_base 18: mod_base = OTHER; note = 5-methyl cytidine
actttcgtccttaagatcat

SEQ ID NO: 158 - RNA, 20 nt, synthetic construct
  source 1..20: mol_type = other RNA
  modified_base 1..20: mod_base = OTHER; note = Phosphorothioate linkage
  modified_base 1..20: mod_base = OTHER; note = 2'-O-(2-methoxyethyl) ribonucleotide
  modified_base 2: mod_base = OTHER; note = 5-methyl cytidine
  modified_base 9: mod_base = OTHER; note = 5-methyl cytidine
  modified_base 13: mod_base = OTHER; note = 5-methyl cytidine
  modified_base 15: mod_base = OTHER; note = 5-methyl cytidine
  modified_base 18: mod_base = OTHER; note = 5-methyl cytidine
  modified_base 20: mod_base = OTHER; note = 5-methyl cytidine
acattggacttactcaactc

SEQ ID NO: 159 - RNA, 20 nt, synthetic construct
  source 1..20: mol_type = other RNA
  modified_base 1..20: mod_base = OTHER; note = Phosphorothioate linkage
  modified_base 1..20: mod_base = OTHER; note = 2'-O-(2-methoxyethyl) ribonucleotide
  modified_base 4: mod_base = OTHER; note = 5-methyl cytidine
  modified_base 15: mod_base = OTHER; note = 5-methyl cytidine
  modified_base 18: mod_base = OTHER; note = 5-methyl cytidine
tggcgttattaattctacag

SEQ ID NO: 160 - RNA, 20 nt, synthetic construct
  source 1..20: mol_type = other RNA
  modified_base 1..20: mod_base = OTHER; note = Phosphorothioate linkage
  modified_base 1..20: mod_base = OTHER; note = 2'-O-(2-methoxyethyl) ribonucleotide
  modified_base 3: mod_base = OTHER; note = 5-methyl cytidine
  modified_base 20: mod_base = OTHER; note = 5-methyl cytidine
tgctaggattgtaattagtc

SEQ ID NO: 161 - RNA, 20 nt, synthetic construct
  source 1..20: mol_type = other RNA
  modified_base 1..20: mod_base = OTHER; note = Phosphorothioate linkage
  modified_base 1..20: mod_base = OTHER; note = 2'-O-(2-methoxyethyl) ribonucleotide
  modified_base 6: mod_base = OTHER; note = 5-methyl cytidine
  modified_base 16: mod_base = OTHER; note = 5-methyl cytidine
gagtgctgtggagatcaatg

SEQ ID NO: 162 - RNA, 20 nt, synthetic construct
  source 1..20: mol_type = other RNA
  modified_base 1..20: mod_base = OTHER; note = Phosphorothioate linkage
  modified_base 1..20: mod_base = OTHER; note = 2'-O-(2-methoxyethyl) ribonucleotide
  modified_base 3: mod_base = OTHER; note = 5-methyl cytidine
  modified_base 17..18: mod_base = OTHER; note = 5-methyl cytidine
tgcttatgaatgaagtccat

SEQ ID NO: 163 - RNA, 20 nt, synthetic construct
  source 1..20: mol_type = other RNA
  modified_base 1..20: mod_base = OTHER; note = Phosphorothioate linkage
  modified_base 1..20: mod_base = OTHER; note = 2'-O-(2-methoxyethyl) ribonucleotide
  modified_base 2: mod_base = OTHER; note = 5-methyl cytidine
  modified_base 8: mod_base = OTHER; note = 5-methyl cytidine
  modified_base 11..12: mod_base = OTHER; note = 5-methyl cytidine
  modified_base 14: mod_base = OTHER; note = 5-methyl cytidine
  modified_base 16: mod_base = OTHER; note = 5-methyl cytidine
  modified_base 18: mod_base = OTHER; note = 5-methyl cytidine
acaagaactaccgcactcaa

SEQ ID NO: 164 - RNA, 20 nt, synthetic construct
  source 1..20: mol_type = other RNA
  modified_base 1..20: mod_base = OTHER; note = Phosphorothioate linkage
  modified_base 1..20: mod_base = OTHER; note = 2'-O-(2-methoxyethyl) ribonucleotide
  modified_base 7: mod_base = OTHER; note = 5-methyl cytidine
  modified_base 9: mod_base = OTHER; note = 5-methyl cytidine
  modified_base 19..20: mod_base = OTHER; note = 5-methyl cytidine
tttatgcacaataatgagcc

SEQ ID NO: 165 - RNA, 20 nt, synthetic construct
  source 1..20: mol_type = other RNA
  modified_base 1..20: mod_base = OTHER; note = Phosphorothioate linkage
  modified_base 1..20: mod_base = OTHER; note = 2'-O-(2-methoxyethyl) ribonucleotide
  modified_base 3: mod_base = OTHER; note = 5-methyl cytidine
  modified_base 17..19: mod_base = OTHER; note = 5-methyl cytidine
ggcaattataaaggtaccct

SEQ ID NO: 166 - RNA, 20 nt, synthetic construct
  source 1..20: mol_type = other RNA
  modified_base 1..20: mod_base = OTHER; note = Phosphorothioate linkage
  modified_base 1..20: mod_base = OTHER; note = 2'-O-(2-methoxyethyl) ribonucleotide
  modified_base 2..5: mod_base = OTHER; note = 5-methyl cytidine
  modified_base 9: mod_base = OTHER; note = 5-methyl cytidine
gccccttgcgagtgataaat

SEQ ID NO: 167 - RNA, 20 nt, synthetic construct
  source 1..20: mol_type = other RNA
  modified_base 1..20: mod_base = OTHER; note = Phosphorothioate linkage
  modified_base 1..20: mod_base = OTHER; note = 2'-O-(2-methoxyethyl) ribonucleotide
  modified_base 4..5: mod_base = OTHER; note = 5-methyl cytidine
  modified_base 9: mod_base = OTHER; note = 5-methyl cytidine
  modified_base 12..14: mod_base = OTHER; note = 5-methyl cytidine
  modified_base 18..20: mod_base = OTHER; note = 5-methyl cytidine
aatccaatctacccataccc

SEQ ID NO: 168 - RNA, 20 nt, synthetic construct
  source 1..20: mol_type = other RNA
  modified_base 1..20: mod_base = OTHER; note = Phosphorothioate linkage
  modified_base 1..20: mod_base = OTHER; note = 2'-O-(2-methoxyethyl) ribonucleotide
  modified_base 2..3: mod_base = OTHER; note = 5-methyl cytidine
  modified_base 5: mod_base = OTHER; note = 5-methyl cytidine
  modified_base 8: mod_base = OTHER; note = 5-methyl cytidine
  modified_base 14: mod_base = OTHER; note = 5-methyl cytidine
  modified_base 19: mod_base = OTHER; note = 5-methyl cytidine
tccacgactgaaacatgact

SEQ ID NO: 169 - RNA, 20 nt, synthetic construct
  source 1..20: mol_type = other RNA
  modified_base 1..20: mod_base = OTHER; note = Phosphorothioate linkage
  modified_base 1..20: mod_base = OTHER; note = 2'-O-(2-methoxyethyl) ribonucleotide
  modified_base 6: mod_base = OTHER; note = 5-methyl cytidine
  modified_base 8: mod_base = OTHER; note = 5-methyl cytidine
  modified_base 12: mod_base = OTHER; note = 5-methyl cytidine
  modified_base 16: mod_base = OTHER; note = 5-methyl cytidine
  modified_base 20: mod_base = OTHER; note = 5-methyl cytidine
gtgttcacttactagctatc

SEQ ID NO: 170 - RNA, 20 nt, synthetic construct
  source 1..20: mol_type = other RNA
  modified_base 1..20: mod_base = OTHER; note = Phosphorothioate linkage
  modified_base 1..20: mod_base = OTHER; note = 2'-O-(2-methoxyethyl) ribonucleotide
  modified_base 5: mod_base = OTHER; note = 5-methyl cytidine
gtgtctgggaggtttagtta

SEQ ID NO: 171 - RNA, 20 nt, synthetic construct
  source 1..20: mol_type = other RNA
  modified_base 1..20: mod_base = OTHER; note = Phosphorothioate linkage
  modified_base 1..20: mod_base = OTHER; note = 2'-O-(2-methoxyethyl) ribonucleotide
  modified_base 6: mod_base = OTHER; note = 5-methyl cytidine
  modified_base 11..12: mod_base = OTHER; note = 5-methyl cytidine
  modified_base 14: mod_base = OTHER; note = 5-methyl cytidine
  modified_base 19..20: mod_base = OTHER; note = 5-methyl cytidine
gaggactgtgccacataacc

SEQ ID NO: 172 - RNA, 20 nt, synthetic construct
  source 1..20: mol_type = other RNA
  modified_base 1..20: mod_base = OTHER; note = Phosphorothioate linkage
  modified_base 1..20: mod_base = OTHER; note = 2'-O-(2-methoxyethyl) ribonucleotide
  modified_base 1: mod_base = OTHER; note = 5-methyl cytidine
  modified_base 5..6: mod_base = OTHER; note = 5-methyl cytidine
  modified_base 16: mod_base = OTHER; note = 5-methyl cytidine
  modified_base 19..20: mod_base = OTHER; note = 5-methyl cytidine
caatcctggaagtggcatcc

SEQ ID NO: 173 - RNA, 20 nt, synthetic construct
  source 1..20: mol_type = other RNA
  modified_base 1..20: mod_base = OTHER; note = Phosphorothioate linkage
  modified_base 1..20: mod_base = OTHER; note = 2'-O-(2-methoxyethyl) ribonucleotide
  modified_base 9: mod_base = OTHER; note = 5-methyl cytidine
atatggagcattttgtatgg

SEQ ID NO: 174 - RNA, 20 nt, synthetic construct
  source 1..20: mol_type = other RNA
  modified_base 1..20: mod_base = OTHER; note = Phosphorothioate linkage
  modified_base 1..20: mod_base = OTHER; note = 2'-O-(2-methoxyethyl) ribonucleotide
  modified_base 8: mod_base = OTHER; note = 5-methyl cytidine
  modified_base 10..11: mod_base = OTHER; note = 5-methyl cytidine
  modified_base 17: mod_base = OTHER; note = 5-methyl cytidine
ttaaggtctccttggacatg

SEQ ID NO: 175 - RNA, 20 nt, synthetic construct
  source 1..20: mol_type = other RNA
  modified_base 1..20: mod_base = OTHER; note = Phosphorothioate linkage
  modified_base 1..20: mod_base = OTHER; note = 2'-O-(2-methoxyethyl) ribonucleotide
  modified_base 4: mod_base = OTHER; note = 5-methyl cytidine
  modified_base 10: mod_base = OTHER; note = 5-methyl cytidine
  modified_base 12: mod_base = OTHER; note = 5-methyl cytidine
  modified_base 15..16: mod_base = OTHER; note = 5-methyl cytidine
  modified_base 19..20: mod_base = OTHER; note = 5-methyl cytidine
tgacagaagctctaccatcc

SEQ ID NO: 176 - RNA, 20 nt, synthetic construct
  source 1..20: mol_type = other RNA
  modified_base 1..20: mod_base = OTHER; note = Phosphorothioate linkage
  modified_base 1..20: mod_base = OTHER; note = 2'-O-(2-methoxyethyl) ribonucleotide
  modified_base 1..2: mod_base = OTHER; note = 5-methyl cytidine
  modified_base 4: mod_base = OTHER; note = 5-methyl cytidine
  modified_base 14..15: mod_base = OTHER; note = 5-methyl cytidine
cctcatgtgaagtccagtag

SEQ ID NO: 177 - RNA, 20 nt, synthetic construct
  source 1..20: mol_type = other RNA
  modified_base 1..20: mod_base = OTHER; note = Phosphorothioate linkage
  modified_base 1..20: mod_base = OTHER; note = 2'-O-(2-methoxyethyl) ribonucleotide
  modified_base 11: mod_base = OTHER; note = 5-methyl cytidine
  modified_base 15: mod_base = OTHER; note = 5-methyl cytidine
ggtagtgatacttgctaatt

SEQ ID NO: 178 - RNA, 20 nt, synthetic construct
  source 1..20: mol_type = other RNA
  modified_base 1..20: mod_base = OTHER; note = Phosphorothioate linkage
  modified_base 1..20: mod_base = OTHER; note = 2'-O-(2-methoxyethyl) ribonucleotide
  modified_base 1: mod_base = OTHER; note = 5-methyl cytidine
cttgttggatgatttggtta

SEQ ID NO: 179 - RNA, 20 nt, synthetic construct
  source 1..20: mol_type = other RNA
  modified_base 1..20: mod_base = OTHER; note = Phosphorothioate linkage
  modified_base 1..20: mod_base = OTHER; note = 2'-O-(2-methoxyethyl) ribonucleotide
  modified_base 9: mod_base = OTHER; note = 5-methyl cytidine
  modified_base 12: mod_base = OTHER; note = 5-methyl cytidine
ttagttgactgcagagggag

SEQ ID NO: 180 - RNA, 20 nt, synthetic construct
  source 1..20: mol_type = other RNA
  modified_base 1..20: mod_base = OTHER; note = Phosphorothioate linkage
  modified_base 1..20: mod_base = OTHER; note = 2'-O-(2-methoxyethyl) ribonucleotide
  modified_base 7: mod_base = OTHER; note = 5-methyl cytidine
  modified_base 9: mod_base = OTHER; note = 5-methyl cytidine
  modified_base 15: mod_base = OTHER; note = 5-methyl cytidine
gaaggacacaatttctgtag

SEQ ID NO: 181 - RNA, 20 nt, synthetic construct
  source 1..20: mol_type = other RNA
  modified_base 1..20: mod_base = OTHER; note = Phosphorothioate linkage
  modified_base 1..20: mod_base = OTHER; note = 2'-O-(2-methoxyethyl) ribonucleotide
  modified_base 2: mod_base = OTHER; note = 5-methyl cytidine
  modified_base 6: mod_base = OTHER; note = 5-methyl cytidine
  modified_base 15: mod_base = OTHER; note = 5-methyl cytidine
gctttcttaggtagcttatg

SEQ ID NO: 182 - RNA, 20 nt, synthetic construct
  source 1..20: mol_type = other RNA
  modified_base 1..20: mod_base = OTHER; note = Phosphorothioate linkage
  modified_base 1..20: mod_base = OTHER; note = 2'-O-(2-methoxyethyl) ribonucleotide
  modified_base 8: mod_base = OTHER; note = 5-methyl cytidine
  modified_base 16: mod_base = OTHER; note = 5-methyl cytidine
  modified_base 20: mod_base = OTHER; note = 5-methyl cytidine
tttgtggcatagagactagc

SEQ ID NO: 183 - RNA, 20 nt, synthetic construct
  source 1..20: mol_type = other RNA
  modified_base 1..20: mod_base = OTHER; note = Phosphorothioate linkage
  modified_base 1..20: mod_base = OTHER; note = 2'-O-(2-methoxyethyl) ribonucleotide
  modified_base 9..10: mod_base = OTHER; note = 5-methyl cytidine
  modified_base 13: mod_base = OTHER; note = 5-methyl cytidine
  modified_base 20: mod_base = OTHER; note = 5-methyl cytidine
gtgtaaagccagcatgagtc

SEQ ID NO: 184 - RNA, 20 nt, synthetic construct
  source 1..20: mol_type = other RNA
  modified_base 1..20: mod_base = OTHER; note = Phosphorothioate linkage
  modified_base 1..20: mod_base = OTHER; note = 2'-O-(2-methoxyethyl) ribonucleotide
  modified_base 7..8: mod_base = OTHER; note = 5-methyl cytidine
  modified_base 10..12: mod_base = OTHER; note = 5-methyl cytidine
  modified_base 20: mod_base = OTHER; note = 5-methyl cytidine
ttattaccaccctgaaaatc

SEQ ID NO: 185 - RNA, 20 nt, synthetic construct
  source 1..20: mol_type = other RNA
  modified_base 1..20: mod_base = OTHER; note = Phosphorothioate linkage
  modified_base 1..20: mod_base = OTHER; note = 2'-O-(2-methoxyethyl) ribonucleotide
  modified_base 2: mod_base = OTHER; note = 5-methyl cytidine
  modified_base 4: mod_base = OTHER; note = 5-methyl cytidine
  modified_base 6..7: mod_base = OTHER; note = 5-methyl cytidine
  modified_base 11: mod_base = OTHER; note = 5-methyl cytidine
  modified_base 13: mod_base = OTHER; note = 5-methyl cytidine
  modified_base 19: mod_base = OTHER; note = 5-methyl cytidine
gcacaccaatcacagaagct

SEQ ID NO: 186 - RNA, 20 nt, synthetic construct
  source 1..20: mol_type = other RNA
  modified_base 1..20: mod_base = OTHER; note = Phosphorothioate linkage
  modified_base 1..20: mod_base = OTHER; note = 2'-O-(2-methoxyethyl) ribonucleotide
  modified_base 12: mod_base = OTHER; note = 5-methyl cytidine
  modified_base 20: mod_base = OTHER; note = 5-methyl cytidine
gatgggttaggcaggaagtc

SEQ ID NO: 187 - RNA, 20 nt, synthetic construct
  source 1..20: mol_type = other RNA
  modified_base 1..20: mod_base = OTHER; note = Phosphorothioate linkage
  modified_base 1..20: mod_base = OTHER; note = 2'-O-(2-methoxyethyl) ribonucleotide
  modified_base 2: mod_base = OTHER; note = 5-methyl cytidine
  modified_base 6: mod_base = OTHER; note = 5-methyl cytidine
  modified_base 11: mod_base = OTHER; note = 5-methyl cytidine
  modified_base 13: mod_base = OTHER; note = 5-methyl cytidine
  modified_base 16..17: mod_base = OTHER; note = 5-methyl cytidine
  modified_base 19..20: mod_base = OTHER; note = 5-methyl cytidine
aacttctgttcacggccacc

SEQ ID NO: 188 - RNA, 20 nt, synthetic construct
  source 1..20: mol_type = other RNA
  modified_base 1..20: mod_base = OTHER; note = Phosphorothioate linkage
  modified_base 1..20: mod_base = OTHER; note = 2'-O-(2-methoxyethyl) ribonucleotide
  modified_base 5..6: mod_base = OTHER; note = 5-methyl cytidine
agtgccagtaggatgagttg

SEQ ID NO: 189 - RNA, 20 nt, synthetic construct
  source 1..20: mol_type = other RNA
  modified_base 1..20: mod_base = OTHER; note = Phosphorothioate linkage
  modified_base 1..20: mod_base = OTHER; note = 2'-O-(2-methoxyethyl) ribonucleotide
  modified_base 3..4: mod_base = OTHER; note = 5-methyl cytidine
  modified_base 9: mod_base = OTHER; note = 5-methyl cytidine
  modified_base 17: mod_base = OTHER; note = 5-methyl cytidine
  modified_base 20: mod_base = OTHER; note = 5-methyl cytidine
gaccaggtcataaatacagc

SEQ ID NO: 190 - RNA, 20 nt, synthetic construct
  source 1..20: mol_type = other RNA
  modified_base 1..20: mod_base = OTHER; note = Phosphorothioate linkage
  modified_base 1..20: mod_base = OTHER; note = 2'-O-(2-methoxyethyl) ribonucleotide
  modified_base 8: mod_base = OTHER; note = 5-methyl cytidine
  modified_base 20: mod_base = OTHER; note = 5-methyl cytidine
ggaaggacttgagttatatc

SEQ ID NO: 191 - RNA, 20 nt, synthetic construct
  source 1..20: mol_type = other RNA
  modified_base 1..20: mod_base = OTHER; note = Phosphorothioate linkage
  modified_base 1..20: mod_base = OTHER; note = 2'-O-(2-methoxyethyl) ribonucleotide
  modified_base 9..11: mod_base = OTHER; note = 5-methyl cytidine
  modified_base 14: mod_base = OTHER; note = 5-methyl cytidine
aaaagtgacccatcagtatg

SEQ ID NO: 192 - RNA, 20 nt, synthetic construct
  source 1..20: mol_type = other RNA
  modified_base 1..20: mod_base = OTHER; note = Phosphorothioate linkage
  modified_base 1..20: mod_base = OTHER; note = 2'-O-(2-methoxyethyl) ribonucleotide
  modified_base 10: mod_base = OTHER; note = 5-methyl cytidine
  modified_base 14..15: mod_base = OTHER; note = 5-methyl cytidine
tgtttgatgcagaccttaag

SEQ ID NO: 193 - RNA, 20 nt, synthetic construct
  source 1..20: mol_type = other RNA
  modified_base 1..20: mod_base = OTHER; note = Phosphorothioate linkage
  modified_base 1..20: mod_base = OTHER; note = 2'-O-(2-methoxyethyl) ribonucleotide
  modified_base 4: mod_base = OTHER; note = 5-methyl cytidine
  modified_base 14..15: mod_base = OTHER; note = 5-methyl cytidine
ttacagttagtgtccttgag

SEQ ID NO: 194 - RNA, 20 nt, synthetic construct
  source 1..20: mol_type = other RNA
  modified_base 1..20: mod_base = OTHER; note = Phosphorothioate linkage
  modified_base 1..20: mod_base = OTHER; note = 2'-O-(2-methoxyethyl) ribonucleotide
  modified_base 1: mod_base = OTHER; note = 5-methyl cytidine
  modified_base 10: mod_base = OTHER; note = 5-methyl cytidine
  modified_base 12: mod_base = OTHER; note = 5-methyl cytidine
  modified_base 16: mod_base = OTHER; note = 5-methyl cytidine
  modified_base 19..20: mod_base = OTHER; note = 5-methyl cytidine
caaatgttacgctggctacc

SEQ ID NO: 195 - RNA, 20 nt, synthetic construct
  source 1..20: mol_type = other RNA
  modified_base 1..20: mod_base = OTHER; note = Phosphorothioate linkage
  modified_base 1..20: mod_base = OTHER; note = 2'-O-(2-methoxyethyl) ribonucleotide
  modified_base 12: mod_base = OTHER; note = 5-methyl cytidine
  modified_base 14: mod_base = OTHER; note = 5-methyl cytidine
attgaagattgcactatgga

SEQ ID NO: 196 - RNA, 20 nt, synthetic construct
  source 1..20: mol_type = other RNA
  modified_base 1..20: mod_base = OTHER; note = Phosphorothioate linkage
  modified_base 1..20: mod_base = OTHER; note = 2'-O-(2-methoxyethyl) ribonucleotide
  modified_base 9: mod_base = OTHER; note = 5-methyl cytidine
  modified_base 12..13: mod_base = OTHER; note = 5-methyl cytidine
gtagaattcagccaatagtt

SEQ ID NO: 197 - RNA, 20 nt, synthetic construct
  source 1..20: mol_type = other RNA
  modified_base 1..20: mod_base = OTHER; note = Phosphorothioate linkage
  modified_base 1..20: mod_base = OTHER; note = 2'-O-(2-methoxyethyl) ribonucleotide
  modified_base 1: mod_base = OTHER; note = 5-methyl cytidine
  modified_base 8..9: mod_base = OTHER; note = 5-methyl cytidine
  modified_base 19..20: mod_base = OTHER; note = 5-methyl cytidine
ctgtggaccaatttggaacc

SEQ ID NO: 198 - RNA, 20 nt, synthetic construct
  source 1..20: mol_type = other RNA
  modified_base 1..20: mod_base = OTHER; note = Phosphorothioate linkage
  modified_base 1..20: mod_base = OTHER; note = 2'-O-(2-methoxyethyl) ribonucleotide
  modified_base 3..4: mod_base = OTHER; note = 5-methyl cytidine
  modified_base 6..7: mod_base = OTHER; note = 5-methyl cytidine
  modified_base 9: mod_base = OTHER; note = 5-methyl cytidine
  modified_base 14..16: mod_base = OTHER; note = 5-methyl cytidine
agcctcctcattacccagta

SEQ ID NO: 199 - RNA, 20 nt, synthetic construct
  source 1..20: mol_type = other RNA
  modified_base 1..20: mod_base = OTHER; note = Phosphorothioate linkage
  modified_base 1..20: mod_base = OTHER; note = 2'-O-(2-methoxyethyl) ribonucleotide
  modified_base 2: mod_base = OTHER; note = 5-methyl cytidine
  modified_base 4: mod_base = OTHER; note = 5-methyl cytidine
  modified_base 16: mod_base = OTHER; note = 5-methyl cytidine
  modified_base 19: mod_base = OTHER; note = 5-methyl cytidine
gctctgaaagtgtgactact

SEQ ID NO: 200 - RNA, 20 nt, synthetic construct
  source 1..20: mol_type = other RNA
  modified_base 1..20: mod_base = OTHER; note = Phosphorothioate linkage
  modified_base 1..20: mod_base = OTHER; note = 2'-O-(2-methoxyethyl) ribonucleotide
  modified_base 4: mod_base = OTHER; note = 5-methyl cytidine
  modified_base 11: mod_base = OTHER; note = 5-methyl cytidine
  modified_base 20: mod_base = OTHER; note = 5-methyl cytidine
tggcgggaatcatggagtgc

SEQ ID NO: 201 - RNA, 20 nt, synthetic construct
  source 1..20: mol_type = other RNA
  modified_base 1..20: mod_base = OTHER; note = Phosphorothioate linkage
  modified_base 1..20: mod_base = OTHER; note = 2'-O-(2-methoxyethyl) ribonucleotide
  modified_base 14: mod_base = OTHER; note = 5-methyl cytidine
  modified_base 19: mod_base = OTHER; note = 5-methyl cytidine
ggagtggagtaagcaagact

SEQ ID NO: 202 - RNA, 20 nt, synthetic construct
  source 1..20: mol_type = other RNA
  modified_base 1..20: mod_base = OTHER; note = Phosphorothioate linkage
  modified_base 1..20: mod_base = OTHER; note = 2'-O-(2-methoxyethyl) ribonucleotide
  modified_base 1: mod_base = OTHER; note = 5-methyl cytidine
  modified_base 19: mod_base = OTHER; note = 5-methyl cytidine
ctggtgtatgtaaggaagct

SEQ ID NO: 203 - RNA, 20 nt, synthetic construct
  source 1..20: mol_type = other RNA
  modified_base 1..20: mod_base = OTHER; note = Phosphorothioate linkage
  modified_base 1..20: mod_base = OTHER; note = 2'-O-(2-methoxyethyl) ribonucleotide
  modified_base 5: mod_base = OTHER; note = 5-methyl cytidine
  modified_base 11: mod_base = OTHER; note = 5-methyl cytidine
  modified_base 20: mod_base = OTHER; note = 5-methyl cytidine
ggaacaagtacatgggtatc

SEQ ID NO: 204 - RNA, 20 nt, synthetic construct
  source 1..20: mol_type = other RNA
  modified_base 1..20: mod_base = OTHER; note = Phosphorothioate linkage
  modified_base 1..20: mod_base = OTHER; note = 2'-O-(2-methoxyethyl) ribonucleotide
  modified_base 4: mod_base = OTHER; note = 5-methyl cytidine
taactgggttttatggaagg

SEQ ID NO: 205 - RNA, 20 nt, synthetic construct
  source 1..20: mol_type = other RNA
  modified_base 1..20: mod_base = OTHER; note = Phosphorothioate linkage
  modified_base 1..20: mod_base = OTHER; note = 2'-O-(2-methoxyethyl) ribonucleotide
  modified_base 4: mod_base = OTHER; note = 5-methyl cytidine
  modified_base 11: mod_base = OTHER; note = 5-methyl cytidine
tgtcagttagcgtgtgaggg

SEQ ID NO: 206 - RNA, 20 nt, synthetic construct
  source 1..20: mol_type = other RNA
  modified_base 1..20: mod_base = OTHER; note = Phosphorothioate linkage
  modified_base 1..20: mod_base = OTHER; note = 2'-O-(2-methoxyethyl) ribonucleotide
  modified_base 2: mod_base = OTHER; note = 5-methyl cytidine
  modified_base 8: mod_base = OTHER; note = 5-methyl cytidine
acgtatgctgtgtgagagag

SEQ ID NO: 207 - RNA, 20 nt, synthetic construct
  source 1..20: mol_type = other RNA
  modified_base 1..20: mod_base = OTHER; note = Phosphorothioate linkage
  modified_base 1..20: mod_base = OTHER; note = 2'-O-(2-methoxyethyl) ribonucleotide
agggatatgatagggagtgt

SEQ ID NO: 208 - RNA, 20 nt, synthetic construct
  source 1..20: mol_type = other RNA
  modified_base 1..20: mod_base = OTHER; note = Phosphorothioate linkage
  modified_base 1..20: mod_base = OTHER; note = 2'-O-(2-methoxyethyl) ribonucleotide
atggtgtaaatggtatggag

SEQ ID NO: 209 - RNA, 20 nt, synthetic construct
  source 1..20: mol_type = other RNA
  modified_base 1..20: mod_base = OTHER; note = Phosphorothioate linkage
  modified_base 1..20: mod_base = OTHER; note = 2'-O-(2-methoxyethyl) ribonucleotide
  modified_base 11: mod_base = OTHER; note = 5-methyl cytidine
  modified_base 14: mod_base = OTHER; note = 5-methyl cytidine
gtttagttgactgcagaggg

SEQ ID NO: 210 - RNA, 20 nt, synthetic construct
  source 1..20: mol_type = other RNA
  modified_base 1..20: mod_base = OTHER; note = Phosphorothioate linkage
  modified_base 1..20: mod_base = OTHER; note = 2'-O-(2-methoxyethyl) ribonucleotide
  modified_base 13: mod_base = OTHER; note = 5-methyl cytidine
  modified_base 16: mod_base = OTHER; note = 5-methyl cytidine
tagtttagttgactgcagag

SEQ ID NO: 211 - RNA, 20 nt, synthetic construct
  source 1..20: mol_type = other RNA
  modified_base 1..20: mod_base = OTHER; note = Phosphorothioate linkage
  modified_base 1..20: mod_base = OTHER; note = 2'-O-(2-methoxyethyl) ribonucleotide
  modified_base 3: mod_base = OTHER; note = 5-methyl cytidine
  modified_base 18: mod_base = OTHER; note = 5-methyl cytidine
ttctgtagtttagttgactg

SEQ ID NO: 212 - RNA, 20 nt, synthetic construct
  source 1..20: mol_type = other RNA
  modified_base 1..20: mod_base = OTHER; note = Phosphorothioate linkage
  modified_base 1..20: mod_base = OTHER; note = 2'-O-(2-methoxyethyl) ribonucleotide
  modified_base 5: mod_base = OTHER; note = 5-methyl cytidine
  modified_base 7: mod_base = OTHER; note = 5-methyl cytidine
  modified_base 13: mod_base = OTHER; note = 5-methyl cytidine
aggacacaatttctgtagtt

SEQ ID NO: 213 - DNA, 20 bp, synthetic construct
  source 1..20: mol_type = other DNA
  modified_base 1..20: mod_base = OTHER; note = Phosphorothioate linkage
  modified_base 1..5: mod_base = OTHER; note = 2'-O-(2-methoxyethyl) ribonucleotide
  misc_feature 1..5: note = RNA
  misc_feature 6..15: note = DNA
  misc_feature 16..20: note = RNA
  modified_base 16..20: mod_base = OTHER; note = 2'-O-(2-methoxyethyl) ribonucleotide
  modified_base 7: mod_base = OTHER; note = 5-methyl cytidine
  modified_base 9: mod_base = OTHER; note = 5-methyl cytidine
  modified_base 15: mod_base = OTHER; note = 5-methyl cytidine
gaaggacacaatttctgtag

SEQ ID NO: 214 - RNA, 20 nt, synthetic construct
  source 1..20: mol_type = other RNA
  modified_base 1..20: mod_base = OTHER; note = Phosphorothioate linkage
  modified_base 1..20: mod_base = OTHER; note = 2'-O-(2-methoxyethyl) ribonucleotide
  modified_base 9: mod_base = OTHER; note = 5-methyl cytidine
  modified_base 11: mod_base = OTHER; note = 5-methyl cytidine
  modified_base 17: mod_base = OTHER; note = 5-methyl cytidine
tggaaggacacaatttctgt

SEQ ID NO: 215 - RNA, 20 nt, synthetic construct
  source 1..20: mol_type = other RNA
  modified_base 1..20: mod_base = OTHER; note = Phosphorothioate linkage
  modified_base 1..20: mod_base = OTHER; note = 2'-O-(2-methoxyethyl) ribonucleotide
  modified_base 3: mod_base = OTHER; note = 5-methyl cytidine
  modified_base 7: mod_base = OTHER; note = 5-methyl cytidine
  modified_base 20: mod_base = OTHER; note = 5-methyl cytidine
agcaagctgtgtggaaggac

SEQ ID NO: 216 - RNA, 20 nt, synthetic construct
  source 1..20: mol_type = other RNA
  modified_base 1..20: mod_base = OTHER; note = Phosphorothioate linkage
  modified_base 1..20: mod_base = OTHER; note = 2'-O-(2-methoxyethyl) ribonucleotide
  modified_base 6: mod_base = OTHER; note = 5-methyl cytidine
  modified_base 10: mod_base = OTHER; note = 5-methyl cytidine
taaagcaagctgtgtggaag

SEQ ID NO: 217 - RNA, 20 nt, synthetic construct
  source 1..20: mol_type = other RNA
  modified_base 1..20: mod_base = OTHER; note = Phosphorothioate linkage
  modified_base 1..20: mod_base = OTHER; note = 2'-O-(2-methoxyethyl) ribonucleotide
  modified_base 4: mod_base = OTHER; note = 5-methyl cytidine
tggcaaggagaggatgagta

SEQ ID NO: 218 - RNA, 20 nt, synthetic construct
  source 1..20: mol_type = other RNA
  modified_base 1..20: mod_base = OTHER; note = Phosphorothioate linkage
  modified_base 1..20: mod_base = OTHER; note = 2'-O-(2-methoxyethyl) ribonucleotide
  modified_base 9: mod_base = OTHER; note = 5-methyl cytidine
atgaatggcaaggagaggat

SEQ ID NO: 219 - RNA, 20 nt, synthetic construct
  source 1..20: mol_type = other RNA
  modified_base 1..20: mod_base = OTHER; note = Phosphorothioate linkage
  modified_base 1..20: mod_base = OTHER; note = 2'-O-(2-methoxyethyl) ribonucleotide
  modified_base 16: mod_base = OTHER; note = 5-methyl cytidine
gatgtagatgaatggcaagg

SEQ ID NO: 220 - DNA, 20 bp, synthetic construct
  source 1..20: mol_type = other DNA
  modified_base 1..20: mod_base = OTHER; note = Phosphorothioate linkage
  modified_base 1..5: mod_base = OTHER; note = 2'-O-(2-methoxyethyl) ribonucleotide
  misc_feature 1..5: note = RNA
  misc_feature 6..15: note = DNA
  misc_feature 16..20: note = RNA
  modified_base 16..20: mod_base = OTHER; note = 2'-O-(2-methoxyethyl) ribonucleotide
  modified_base 18: mod_base = OTHER; note = 5-methyl cytidine
tggatgtagatgaatggcaa

SEQ ID NO: 221 - RNA, 20 nt, synthetic construct
  source 1..20: mol_type = other RNA
  modified_base 1..20: mod_base = OTHER; note = Phosphorothioate linkage
  modified_base 1..20: mod_base = OTHER; note = 2'-O-(2-methoxyethyl) ribonucleotide
  modified_base 20: mod_base = OTHER; note = 5-methyl cytidine
tgtggatgtagatgaatggc

SEQ ID NO: 222 - RNA, 20 nt, synthetic construct
  source 1..20: mol_type = other RNA
  modified_base 1..20: mod_base = OTHER; note = Phosphorothioate linkage
  modified_base 1..20: mod_base = OTHER; note = 2'-O-(2-methoxyethyl) ribonucleotide
gggtgtggatgtagatgaat

SEQ ID NO: 223 - RNA, 20 nt, synthetic construct
  source 1..20: mol_type = other RNA
  modified_base 1..20: mod_base = OTHER; note = Phosphorothioate linkage
  modified_base 1..20: mod_base = OTHER; note = 2'-O-(2-methoxyethyl) ribonucleotide
atgggtgtggatgtagatga

SEQ ID NO: 224 - RNA, 20 nt, synthetic construct
  source 1..20: mol_type = other RNA
  modified_base 1..20: mod_base = OTHER; note = Phosphorothioate linkage
  modified_base 1..20: mod_base = OTHER; note = 2'-O-(2-methoxyethyl) ribonucleotide
aaatgggtgtggatgtagat

SEQ ID NO: 225 - RNA, 20 nt, synthetic construct
  source 1..20: mol_type = other RNA
  modified_base 1..20: mod_base = OTHER; note = Phosphorothioate linkage
  modified_base 1..20: mod_base = OTHER; note = 2'-O-(2-methoxyethyl) ribonucleotide
aaaaatgggtgtggatgtag

SEQ ID NO: 226 - RNA, 20 nt, synthetic construct
  source 1..20: mol_type = other RNA
  modified_base 1..20: mod_base = OTHER; note = Phosphorothioate linkage
  modified_base 1..20: mod_base = OTHER; note = 2'-O-(2-methoxyethyl) ribonucleotide
tgggaagtttaaaaaatggg

SEQ ID NO: 227 - RNA, 20 nt, synthetic construct
  source 1..20: mol_type = other RNA
  modified_base 1..20: mod_base = OTHER; note = Phosphorothioate linkage
  modified_base 1..20: mod_base = OTHER; note = 2'-O-(2-methoxyethyl) ribonucleotide
  modified_base 1: mod_base = OTHER; note = 5-methyl cytidine
ctgaagtggaggtggtggaa

SEQ ID NO: 228 - RNA, 20 nt, synthetic construct
  source 1..20: mol_type = other RNA
  modified_base 1..20: mod_base = OTHER; note = Phosphorothioate linkage
  modified_base 1..20: mod_base = OTHER; note = 2'-O-(2-methoxyethyl) ribonucleotide
  modified_base 2..3: mod_base = OTHER; note = 5-methyl cytidine
tcctgaagtggaggtggtgg

SEQ ID NO: 229 - RNA, 20 nt, synthetic construct
  source 1..20: mol_type = other RNA
  modified_base 1..20: mod_base = OTHER; note = Phosphorothioate linkage
  modified_base 1..20: mod_base = OTHER; note = 2'-O-(2-methoxyethyl) ribonucleotide
  modified_base 9..10: mod_base = OTHER; note = 5-methyl cytidine
ggtaagttcctgaagtggag

SEQ ID NO: 230 - RNA, 20 nt, synthetic construct
  source 1..20: mol_type = other RNA
  modified_base 1..20: mod_base = OTHER; note = Phosphorothioate linkage
  modified_base 1..20: mod_base = OTHER; note = 2'-O-(2-methoxyethyl) ribonucleotide
  modified_base 5: mod_base = OTHER; note = 5-methyl cytidine
  modified_base 8: mod_base = OTHER; note = 5-methyl cytidine
  modified_base 18..19: mod_base = OTHER; note = 5-methyl cytidine
gaggcatcaggtaagttcct

SEQ ID NO: 231 - DNA, 20 bp, synthetic construct
  source 1..20: mol_type = other DNA
  modified_base 1..20: mod_base = OTHER; note = Phosphorothioate linkage
  modified_base 1..5: mod_base = OTHER; note = 2'-O-(2-methoxyethyl) ribonucleotide
  misc_feature 1..5: note = RNA
  misc_feature 6..15: note = DNA
  misc_feature 16..20: note = RNA
  modified_base 16..20: mod_base = OTHER; note = 2'-O-(2-methoxyethyl) ribonucleotide
  modified_base 7: mod_base = OTHER; note = 5-methyl cytidine
  modified_base 10: mod_base = OTHER; note = 5-methyl cytidine
  modified_base 20: mod_base = OTHER; note = 5-methyl cytidine
gtgaggcatcaggtaagttc

SEQ ID NO: 232 - RNA, 20 nt, synthetic construct
  source 1..20: mol_type = other RNA
  modified_base 1..20: mod_base = OTHER; note = Phosphorothioate linkage
  modified_base 1..20: mod_base = OTHER; note = 2'-O-(2-methoxyethyl) ribonucleotide
  modified_base 9: mod_base = OTHER; note = 5-methyl cytidine
  modified_base 12: mod_base = OTHER; note = 5-methyl cytidine
aagtgaggcatcaggtaagt

SEQ ID NO: 233 - RNA, 20 nt, synthetic construct
  source 1..20: mol_type = other RNA
  modified_base 1..20: mod_base = OTHER; note = Phosphorothioate linkage
  modified_base 1..20: mod_base = OTHER; note = 2'-O-(2-methoxyethyl) ribonucleotide
  modified_base 2: mod_base = OTHER; note = 5-methyl cytidine
  modified_base 13: mod_base = OTHER; note = 5-methyl cytidine
  modified_base 16: mod_base = OTHER; note = 5-methyl cytidine
acagaagtgaggcatcaggt

SEQ ID NO: 234 - RNA, 20 nt, synthetic construct
  source 1..20: mol_type = other RNA
  modified_base 1..20: mod_base = OTHER; note = Phosphorothioate linkage
  modified_base 1..20: mod_base = OTHER; note = 2'-O-(2-methoxyethyl) ribonucleotide
  modified_base 5: mod_base = OTHER; note = 5-methyl cytidine
  modified_base 16: mod_base = OTHER; note = 5-methyl cytidine
  modified_base 19: mod_base = OTHER; note = 5-methyl cytidine
aagacagaagtgaggcatca

SEQ ID NO: 235 - RNA, 20 nt, synthetic construct
  source 1..20: mol_type = other RNA
  modified_base 1..20: mod_base = OTHER; note = Phosphorothioate linkage
  modified_base 1..20: mod_base = OTHER; note = 2'-O-(2-methoxyethyl) ribonucleotide
  modified_base 7: mod_base = OTHER; note = 5-methyl cytidine
  modified_base 18: mod_base = OTHER; note = 5-methyl cytidine
agaagacagaagtgaggcat

SEQ ID NO: 236 - RNA, 20 nt, synthetic construct
  source 1..20: mol_type = other RNA
  modified_base 1..20: mod_base = OTHER; note = Phosphorothioate linkage
  modified_base 1..20: mod_base = OTHER; note = 2'-O-(2-methoxyethyl) ribonucleotide
  modified_base 7: mod_base = OTHER; note = 5-methyl cytidine
  modified_base 20: mod_base = OTHER; note = 5-methyl cytidine
tgaggtctaatttagaagac

SEQ ID NO: 237 - DNA, 20 bp, synthetic construct
  source 1..20: mol_type = other DNA
  modified_base 1..20: mod_base = OTHER; note = Phosphorothioate linkage
  modified_base 1..5: mod_base = OTHER; note = 2'-O-(2-methoxyethyl) ribonucleotide
  modified_base 6: mod_base = OTHER; note = Locked nucleic acid
  misc_feature 1..6: note = RNA
  misc_feature 7..8: note = DNA
  misc_feature 9: note = RNA
  misc_feature 10..11: note = DNA
  misc_feature 12: note = RNA
  misc_feature 13..14: note = DNA
  misc_feature 15..20: note = RNA
  modified_base 15: mod_base = OTHER; note = Locked amino acid
  modified_base 16..20: mod_base = OTHER; note = 2'-O-(2-methoxyethyl) ribonucleotide
  modified_base 18: mod_base = OTHER; note = 5-methyl cytidine
tggatgtagatgaatggcaa

SEQ ID NO: 238 - DNA, 20 bp, synthetic construct
  source 1..20: mol_type = other DNA
  modified_base 1..20: mod_base = OTHER; note = Phosphorothioate linkage
  modified_base 1..3: mod_base = OTHER; note = 2'-O-(2-methoxyethyl) ribonucleotide
  modified_base 4: mod_base = OTHER; note = Locked nucleic acid
  modified_base 5: mod_base = OTHER; note = 2'-O-(2-methoxyethyl) ribonucleotide
  misc_feature 1..5: note = RNA
  misc_feature 6..7: note = DNA
  misc_feature 8: note = RNA
  modified_base 8: mod_base = OTHER; note = Locked amino acid
  misc_feature 9..11: note = DNA
  misc_feature 12: note = RNA
  modified_base 12: mod_base = OTHER; note = Locked amino acid
  misc_feature 13..15: note = DNA
  misc_feature 16..20: note = RNA
  modified_base 16: mod_base = OTHER; note = Locked amino acid
  modified_base 17..20: mod_base = OTHER; note = 2'-O-(2-methoxyethyl) ribonucleotide
  modified_base 17: mod_base = OTHER; note = 5-methyl cytidine
tggatgtagatgaatggcaa

SEQ ID NO: 239 - DNA, 20 bp, synthetic construct
  source 1..20: mol_type = other DNA
  modified_base 1..20: mod_base = OTHER; note = Phosphorothioate linkage
  modified_base 1..4: mod_base = OTHER; note = 2'-O-(2-methoxyethyl) ribonucleotide
  modified_base 5: mod_base = OTHER; note = Locked nucleic acid
  misc_feature 1..5: note = RNA
  misc_feature 6..8: note = DNA
  misc_feature 9: note = RNA
  modified_base 9: mod_base = OTHER; note = Locked amino acid
  misc_feature 10..12: note = DNA
  misc_feature 13: note = RNA
  modified_base 13: mod_base = OTHER; note = Locked amino acid
  misc_feature 14..15: note = DNA
  misc_feature 16..20: note = RNA
  modified_base 17: mod_base = OTHER; note = Locked amino acid
  modified_base 16..20: mod_base = OTHER; note = 2'-O-(2-methoxyethyl) ribonucleotide
  modified_base 18: mod_base = OTHER; note = 5-methyl cytidine
tggatgtagatgaatggcaa

SEQ ID NO: 240 - RNA, 20 nt, synthetic construct
  source 1..20: mol_type = other RNA
  modified_base 1..20: mod_base = OTHER; note = Phosphorothioate linkage
  modified_base 1..3: mod_base = OTHER; note = 2'-O-(2-methoxyethyl) ribonucleotide
  modified_base 4: mod_base = OTHER; note = Locked nucleic acid
  modified_base 5: mod_base = OTHER; note = 2'-O-(2-methoxyethyl) ribonucleotide
  modified_base 6: mod_base = OTHER; note = Locked nucleic acid
  modified_base 7: mod_base = OTHER; note = 2'-O-(2-methoxyethyl) ribonucleotide
  modified_base 8: mod_base = OTHER; note = Locked nucleic acid
  modified_base 9: mod_base = OTHER; note = 2'-O-(2-methoxyethyl) ribonucleotide
  modified_base 10: mod_base = OTHER; note = Locked nucleic acid
  modified_base 11: mod_base = OTHER; note = 2'-O-(2-methoxyethyl) ribonucleotide
  modified_base 12: mod_base = OTHER; note = Locked nucleic acid
  modified_base 13: mod_base = OTHER; note = 2'-O-(2-methoxyethyl) ribonucleotide
  modified_base 14: mod_base = OTHER; note = Locked nucleic acid
  modified_base 15: mod_base = OTHER; note = 2'-O-(2-methoxyethyl) ribonucleotide
  modified_base 16: mod_base = OTHER; note = Locked nucleic acid
  modified_base 17: mod_base = OTHER; note = 2'-O-(2-methoxyethyl) ribonucleotide
  modified_base 18: mod_base = OTHER; note = Locked nucleic acid
  modified_base 19..20: mod_base = OTHER; note = 2'-O-(2-methoxyethyl) ribonucleotide
  modified_base 18: mod_base = OTHER; note = 5-methyl cytidine
tggatgtagatgaatggcaa

SEQ ID NO: 241 - RNA, 20 nt, synthetic construct
  source 1..20: mol_type = other RNA
  modified_base 1..20: mod_base = OTHER; note = Phosphorothioate linkage
  modified_base 1..2: mod_base = OTHER; note = 2'-O-(2-methoxyethyl) ribonucleotide
  modified_base 3: mod_base = OTHER; note = Locked nucleic acid
  modified_base 4: mod_base = OTHER; note = 2'-O-(2-methoxyethyl) ribonucleotide
  modified_base 5: mod_base = OTHER; note = Locked nucleic acid
  modified_base 6: mod_base = OTHER; note = 2'-O-(2-methoxyethyl) ribonucleotide
  modified_base 7: mod_base = OTHER; note = Locked nucleic acid
  modified_base 8: mod_base = OTHER; note = 2'-O-(2-methoxyethyl) ribonucleotide
  modified_base 9: mod_base = OTHER; note = Locked nucleic acid
  modified_base 10: mod_base = OTHER; note = 2'-O-(2-methoxyethyl) ribonucleotide
  modified_base 11: mod_base = OTHER; note = Locked nucleic acid
  modified_base 12: mod_base = OTHER; note = 2'-O-(2-methoxyethyl) ribonucleotide
  modified_base 13: mod_base = OTHER; note = Locked nucleic acid
  modified_base 14: mod_base = OTHER; note = 2'-O-(2-methoxyethyl) ribonucleotide
  modified_base 15: mod_base = OTHER; note = Locked nucleic acid
  modified_base 16: mod_base = OTHER; note = 2'-O-(2-methoxyethyl) ribonucleotide
  modified_base 17: mod_base = OTHER; note = Locked nucleic acid
  modified_base 18..20: mod_base = OTHER; note = 2'-O-(2-methoxyethyl) ribonucleotide
  modified_base 18: mod_base = OTHER; note = 5-methyl cytidine
tggatgtagatgaatggcaa

SEQ ID NO: 242 - RNA, 20 nt, synthetic construct
  source 1..20: mol_type = other RNA
  modified_base 1..20: mod_base = OTHER; note = Phosphorothioate linkage
  modified_base 1..2: mod_base = OTHER; note = 2'-O-(2-methoxyethyl) ribonucleotide
  modified_base 3: mod_base = OTHER; note = Locked nucleic acid
  modified_base 4..5: mod_base = OTHER; note = 2'-O-(2-methoxyethyl) ribonucleotide
  modified_base 6: mod_base = OTHER; note = Locked nucleic acid
  modified_base 7..8: mod_base = OTHER; note = 2'-O-(2-methoxyethyl) ribonucleotide
  modified_base 9: mod_base = OTHER; note = Locked nucleic acid
  modified_base 10..11: mod_base = OTHER; note = 2'-O-(2-methoxyethyl) ribonucleotide
  modified_base 12: mod_base = OTHER; note = Locked nucleic acid
  modified_base 13..14: mod_base = OTHER; note = 2'-O-(2-methoxyethyl) ribonucleotide
  modified_base 15: mod_base = OTHER; note = Locked nucleic acid
  modified_base 16..17: mod_base = OTHER; note = 2'-O-(2-methoxyethyl) ribonucleotide
  modified_base 18: mod_base = OTHER; note = Locked nucleic acid
  modified_base 19..20: mod_base = OTHER; note = 2'-O-(2-methoxyethyl) ribonucleotide
  modified_base 18: mod_base = OTHER; note = 5-methyl cytidine
tggatgtagatgaatggcaa

SEQ ID NO: 243 - RNA, 20 nt, synthetic construct
  source 1..20: mol_type = other RNA
  modified_base 1..20: mod_base = OTHER; note = Phosphorothioate linkage
  modified_base 1..4: mod_base = OTHER; note = 2'-O-(2-methoxyethyl) ribonucleotide
  modified_base 5: mod_base = OTHER; note = Locked nucleic acid
  modified_base 6..8: mod_base = OTHER; note = 2'-O-(2-methoxyethyl) ribonucleotide
  modified_base 9: mod_base = OTHER; note = Locked nucleic acid
  modified_base 10..12: mod_base = OTHER; note = 2'-O-(2-methoxyethyl) ribonucleotide
  modified_base 13: mod_base = OTHER; note = Locked nucleic acid
  modified_base 14..16: mod_base = OTHER; note = 2'-O-(2-methoxyethyl) ribonucleotide
  modified_base 17: mod_base = OTHER; note = Locked nucleic acid
  modified_base 18..20: mod_base = OTHER; note = 2'-O-(2-methoxyethyl) ribonucleotide
  modified_base 18: mod_base = OTHER; note = 5-methyl cytidine
tggatgtagatgaatggcaa

SEQ ID NO: 244 - RNA, 20 nt, synthetic construct
  source 1..20: mol_type = other RNA
  modified_base 1..20: mod_base = OTHER; note = Phosphorothioate linkage
  modified_base 1..3: mod_base = OTHER; note = 2'-O-(2-methoxyethyl) ribonucleotide
  modified_base 4: mod_base = OTHER; note = Locked nucleic acid
  modified_base 5..7: mod_base = OTHER; note = 2'-O-(2-methoxyethyl) ribonucleotide
  modified_base 8: mod_base = OTHER; note = Locked nucleic acid
  modified_base 9..11: mod_base = OTHER; note = 2'-O-(2-methoxyethyl) ribonucleotide
  modified_base 12: mod_base = OTHER; note = Locked nucleic acid
  modified_base 13..15: mod_base = OTHER; note = 2'-O-(2-methoxyethyl) ribonucleotide
  modified_base 16: mod_base = OTHER; note = Locked nucleic acid
  modified_base 17..20: mod_base = OTHER; note = 2'-O-(2-methoxyethyl) ribonucleotide
  modified_base 18: mod_base = OTHER; note = 5-methyl cytidine
tggatgtagatgaatggcaa

SEQ ID NO: 245 - RNA, 20 nt, synthetic construct
  source 1..20: mol_type = other RNA
  modified_base 1..20: mod_base = OTHER; note = Phosphorothioate linkage
  modified_base 1..5: mod_base = OTHER; note = 2'-O-(2-methoxyethyl) ribonucleotide
  modified_base 6: mod_base = OTHER; note = Locked nucleic acid
  modified_base 7..10: mod_base = OTHER; note = 2'-O-(2-methoxyethyl) ribonucleotide
  modified_base 11: mod_base = OTHER; note = Locked nucleic acid
  modified_base 12..15: mod_base = OTHER; note = 2'-O-(2-methoxyethyl) ribonucleotide
  modified_base 16: mod_base = OTHER; note = Locked nucleic acid
  modified_base 17..20: mod_base = OTHER; note = 2'-O-(2-methoxyethyl) ribonucleotide
  modified_base 18: mod_base = OTHER; note = 5-methyl cytidine
tggatgtagatgaatggcaa

SEQ ID NO: 246 - RNA, 20 nt, synthetic construct
  source 1..20: mol_type = other RNA
  modified_base 1..20: mod_base = OTHER; note = Phosphorothioate linkage
  modified_base 1..4: mod_base = OTHER; note = 2'-O-(2-methoxyethyl) ribonucleotide
  modified_base 5: mod_base = OTHER; note = Locked nucleic acid
  modified_base 6..9: mod_base = OTHER; note = 2'-O-(2-methoxyethyl) ribonucleotide
  modified_base 10: mod_base = OTHER; note = Locked nucleic acid
  modified_base 11..14: mod_base = OTHER; note = 2'-O-(2-methoxyethyl) ribonucleotide
  modified_base 15: mod_base = OTHER; note = Locked nucleic acid
  modified_base 16..20: mod_base = OTHER; note = 2'-O-(2-methoxyethyl) ribonucleotide
  modified_base 18: mod_base = OTHER; note = 5-methyl cytidine
tggatgtagatgaatggcaa

SEQ ID NO: 247 - DNA, 20 bp, synthetic construct
  source 1..20: mol_type = other DNA
  modified_base 1..20: mod_base = OTHER; note = Phosphorothioate linkage
  modified_base 1..5: mod_base = OTHER; note = 2'-O-(2-methoxyethyl) ribonucleotide
  modified_base 6: mod_base = OTHER; note = Locked nucleic acid
  misc_feature 1..6: note = RNA
  misc_feature 7..8: note = DNA
  misc_feature 9: note = RNA
  modified_base 9: mod_base = OTHER; note = Locked amino acid
  misc_feature 10..11: note = DNA
  misc_feature 12: note = RNA
  modified_base 12: mod_base = OTHER; note = Locked amino acid
  misc_feature 13..14: note = DNA
  misc_feature 15..20: note = RNA
  modified_base 15: mod_base = OTHER; note = Locked amino acid
  modified_base 16..20: mod_base = OTHER; note = 2'-O-(2-methoxyethyl) ribonucleotide
  modified_base 7: mod_base = OTHER; note = 5-methyl cytidine
  modified_base 10: mod_base = OTHER; note = 5-methyl cytidine
  modified_base 20: mod_base = OTHER; note = 5-methyl cytidine
gtgaggcatcaggtaagttc

SEQ ID NO: 248 - DNA, 20 bp, synthetic construct
  source 1..20: mol_type = other DNA
  modified_base 1..20: mod_base = OTHER; note = Phosphorothioate linkage
  modified_base 1..3: mod_base = OTHER; note = 2'-O-(2-methoxyethyl) ribonucleotide
  modified_base 4: mod_base = OTHER; note = Locked nucleic acid
  modified_base 5: mod_base = OTHER; note = 2'-O-(2-methoxyethyl) ribonucleotide
  misc_feature 1..5: note = RNA
  misc_feature 6..7: note = DNA
  misc_feature 8: note = RNA
  modified_base 8: mod_base = OTHER; note = Locked amino acid
  misc_feature 9..11: note = DNA
  misc_feature 12: note = RNA
  modified_base 12: mod_base = OTHER; note = Locked amino acid
  misc_feature 13..15: note = DNA
  misc_feature 16..20: note = RNA
  modified_base 16: mod_base = OTHER; note = Locked amino acid
  modified_base 17..20: mod_base = OTHER; note = 2'-O-(2-methoxyethyl) ribonucleotide
  modified_base 7: mod_base = OTHER; note = 5-methyl cytidine
  modified_base 10: mod_base = OTHER; note = 5-methyl cytidine
  modified_base 20: mod_base = OTHER; note = 5-methyl cytidine
gtgaggcatcaggtaagttc

SEQ ID NO: 249 - DNA, 20 bp, synthetic construct
  source 1..20: mol_type = other DNA
  modified_base 1..20: mod_base = OTHER; note = Phosphorothioate linkage
  modified_base 1..4: mod_base = OTHER; note = 2'-O-(2-methoxyethyl) ribonucleotide
  modified_base 5: mod_base = OTHER; note = Locked nucleic acid
  misc_feature 1..5: note = RNA
  misc_feature 6..8: note = DNA
  misc_feature 9: note = RNA
  modified_base 9: mod_base = OTHER; note = Locked amino acid
  misc_feature 10..12: note = DNA
  misc_feature 13: note = RNA
  modified_base 13: mod_base = OTHER; note = Locked amino acid
  misc_feature 14..15: note = DNA
  misc_feature 16..20: note = RNA
  modified_base 17: mod_base = OTHER; note = Locked amino acid
  modified_base 16..20: mod_base = OTHER; note = 2'-O-(2-methoxyethyl) ribonucleotide
  modified_base 7: mod_base = OTHER; note = 5-methyl cytidine
  modified_base 10: mod_base = OTHER; note = 5-methyl cytidine
  modified_base 20: mod_base = OTHER; note = 5-methyl cytidine
gtgaggcatcaggtaagttc

SEQ ID NO: 250 - RNA, 20 nt, synthetic construct
  source 1..20: mol_type = other RNA
  modified_base 1..20: mod_base = OTHER; note = Phosphorothioate linkage
  modified_base 1..3: mod_base = OTHER; note = 2'-O-(2-methoxyethyl) ribonucleotide
  modified_base 4: mod_base = OTHER; note = Locked nucleic acid
  modified_base 5: mod_base = OTHER; note = 2'-O-(2-methoxyethyl) ribonucleotide
  modified_base 6: mod_base = OTHER; note = Locked nucleic acid
  modified_base 7: mod_base = OTHER; note = 2'-O-(2-methoxyethyl) ribonucleotide
  modified_base 8: mod_base = OTHER; note = Locked nucleic acid
  modified_base 9: mod_base = OTHER; note = 2'-O-(2-methoxyethyl) ribonucleotide
  modified_base 10: mod_base = OTHER; note = Locked nucleic acid
  modified_base 11: mod_base = OTHER; note = 2'-O-(2-methoxyethyl) ribonucleotide
  modified_base 12: mod_base = OTHER; note = Locked nucleic acid
  modified_base 13: mod_base = OTHER; note = 2'-O-(2-methoxyethyl) ribonucleotide
  modified_base 14: mod_base = OTHER; note = Locked nucleic acid
  modified_base 15: mod_base = OTHER; note = 2'-O-(2-methoxyethyl) ribonucleotide
  modified_base 16: mod_base = OTHER; note = Locked nucleic acid
  modified_base 17: mod_base = OTHER; note = 2'-O-(2-methoxyethyl) ribonucleotide
  modified_base 18: mod_base = OTHER; note = Locked nucleic acid
  modified_base 19..20: mod_base = OTHER; note = 2'-O-(2-methoxyethyl) ribonucleotide
  modified_base 7: mod_base = OTHER; note = 5-methyl cytidine
  modified_base 10: mod_base = OTHER; note = 5-methyl cytidine
  modified_base 20: mod_base = OTHER; note = 5-methyl cytidine
gtgaggcatcaggtaagttc

SEQ ID NO: 251 - RNA, 20 nt, synthetic construct
  source 1..20: mol_type = other RNA
  modified_base 1..20: mod_base = OTHER; note = Phosphorothioate linkage
  modified_base 1..2: mod_base = OTHER; note = 2'-O-(2-methoxyethyl) ribonucleotide
  modified_base 3: mod_base = OTHER; note = Locked nucleic acid
  modified_base 4: mod_base = OTHER; note = 2'-O-(2-methoxyethyl) ribonucleotide
  modified_base 5: mod_base = OTHER; note = Locked nucleic acid
  modified_base 6: mod_base = OTHER; note = 2'-O-(2-methoxyethyl) ribonucleotide
  modified_base 7: mod_base = OTHER; note = Locked nucleic acid
  modified_base 8: mod_base = OTHER; note = 2'-O-(2-methoxyethyl) ribonucleotide
  modified_base 9: mod_base = OTHER; note = Locked nucleic acid
  modified_base 10: mod_base = OTHER; note = 2'-O-(2-methoxyethyl) ribonucleotide
  modified_base 11: mod_base = OTHER; note = Locked nucleic acid
  modified_base 12: mod_base = OTHER; note = 2'-O-(2-methoxyethyl) ribonucleotide
  modified_base 13: mod_base = OTHER; note = Locked nucleic acid
  modified_base 14: mod_base = OTHER; note = 2'-O-(2-methoxyethyl) ribonucleotide
  modified_base 15: mod_base = OTHER; note = Locked nucleic acid
  modified_base 16: mod_base = OTHER; note = 2'-O-(2-methoxyethyl) ribonucleotide
  modified_base 17: mod_base = OTHER; note = Locked nucleic acid
  modified_base 18..20: mod_base = OTHER; note = 2'-O-(2-methoxyethyl) ribonucleotide
  modified_base 7: mod_base = OTHER; note = 5-methyl cytidine
  modified_base 10: mod_base = OTHER; note = 5-methyl cytidine
  modified_base 20: mod_base = OTHER; note = 5-methyl cytidine
gtgaggcatcaggtaagttc

SEQ ID NO: 252 - RNA, 20 nt, synthetic construct
  source 1..20: mol_type = other RNA
  modified_base 1..20: mod_base = OTHER; note = Phosphorothioate linkage
  modified_base 1..2: mod_base = OTHER; note = 2'-O-(2-methoxyethyl) ribonucleotide
  modified_base 3: mod_base = OTHER; note = Locked nucleic acid
  modified_base 4..5: mod_base = OTHER; note = 2'-O-(2-methoxyethyl) ribonucleotide
  modified_base 6: mod_base = OTHER; note = Locked nucleic acid
  modified_base 7..8: mod_base = OTHER; note = 2'-O-(2-methoxyethyl) ribonucleotide
  modified_base 9: mod_base = OTHER; note = Locked nucleic acid
  modified_base 10..11: mod_base = OTHER; note = 2'-O-(2-methoxyethyl) ribonucleotide
  modified_base 12: mod_base = OTHER; note = Locked nucleic acid
  modified_base 13..14: mod_base = OTHER; note = 2'-O-(2-methoxyethyl) ribonucleotide
  modified_base 15: mod_base = OTHER; note = Locked nucleic acid
  modified_base 16..17: mod_base = OTHER; note = 2'-O-(2-methoxyethyl) ribonucleotide
  modified_base 18: mod_base = OTHER; note = Locked nucleic acid
  modified_base 19..20: mod_base = OTHER; note = 2'-O-(2-methoxyethyl) ribonucleotide
  modified_base 7: mod_base = OTHER; note = 5-methyl cytidine
  modified_base 10: mod_base = OTHER; note = 5-methyl cytidine
  modified_base 20: mod_base = OTHER; note = 5-methyl cytidine
gtgaggcatcaggtaagttc

SEQ ID NO: 253 - RNA, 20 nt, synthetic construct
  source 1..20: mol_type = other RNA
  modified_base 1..20: mod_base = OTHER; note = Phosphorothioate linkage
  modified_base 1..4: mod_base = OTHER; note = 2'-O-(2-methoxyethyl) ribonucleotide
  modified_base 5: mod_base = OTHER; note = Locked nucleic acid
  modified_base 6..8: mod_base = OTHER; note = 2'-O-(2-methoxyethyl) ribonucleotide
  modified_base 9: mod_base = OTHER; note = Locked nucleic acid
  modified_base 10..12: mod_base = OTHER; note = 2'-O-(2-methoxyethyl) ribonucleotide
  modified_base 13: mod_base = OTHER; note = Locked nucleic acid
  modified_base 14..16: mod_base = OTHER; note = 2'-O-(2-methoxyethyl) ribonucleotide
  modified_base 17: mod_base = OTHER; note = Locked nucleic acid
  modified_base 18..20: mod_base = OTHER; note = 2'-O-(2-methoxyethyl) ribonucleotide
  modified_base 7: mod_base = OTHER; note = 5-methyl cytidine
  modified_base 10: mod_base = OTHER; note = 5-methyl cytidine
  modified_base 20: mod_base = OTHER; note = 5-methyl cytidine
gtgaggcatcaggtaagttc

SEQ ID NO: 254 - RNA, 20 nt, synthetic construct
  source 1..20: mol_type = other RNA
  modified_base 1..20: mod_base = OTHER; note = Phosphorothioate linkage
  modified_base 1..3: mod_base = OTHER; note = 2'-O-(2-methoxyethyl) ribonucleotide
  modified_base 4: mod_base = OTHER; note = Locked nucleic acid
  modified_base 5..7: mod_base = OTHER; note = 2'-O-(2-methoxyethyl) ribonucleotide
  modified_base 8: mod_base = OTHER; note = Locked nucleic acid
  modified_base 9..11: mod_base = OTHER; note = 2'-O-(2-methoxyethyl) ribonucleotide
  modified_base 12: mod_base = OTHER; note = Locked nucleic acid
  modified_base 13..15: mod_base = OTHER; note = 2'-O-(2-methoxyethyl) ribonucleotide
  modified_base 16: mod_base = OTHER; note = Locked nucleic acid
  modified_base 17..20: mod_base = OTHER; note = 2'-O-(2-methoxyethyl) ribonucleotide
  modified_base 7: mod_base = OTHER; note = 5-methyl cytidine
  modified_base 10: mod_base = OTHER; note = 5-methyl cytidine
  modified_base 20: mod_base = OTHER; note = 5-methyl cytidine
gtgaggcatcaggtaagttc

SEQ ID NO: 255 - RNA, 20 nt, synthetic construct
  source 1..20: mol_type = other RNA
  modified_base 1..20: mod_base = OTHER; note = Phosphorothioate linkage
  modified_base 1..5: mod_base = OTHER; note = 2'-O-(2-methoxyethyl) ribonucleotide
  modified_base 6: mod_base = OTHER; note = Locked nucleic acid
  modified_base 7..10: mod_base = OTHER; note = 2'-O-(2-methoxyethyl) ribonucleotide
  modified_base 11: mod_base = OTHER; note = Locked nucleic acid
  modified_base 12..15: mod_base = OTHER; note = 2'-O-(2-methoxyethyl) ribonucleotide
  modified_base 16: mod_base = OTHER; note = Locked nucleic acid
  modified_base 17..20: mod_base = OTHER; note = 2'-O-(2-methoxyethyl) ribonucleotide
  modified_base 7: mod_base = OTHER; note = 5-methyl cytidine
  modified_base 10: mod_base = OTHER; note = 5-methyl cytidine
  modified_base 20: mod_base = OTHER; note = 5-methyl cytidine
gtgaggcatcaggtaagttc

SEQ ID NO: 256 - RNA, 20 nt, synthetic construct
  source 1..20: mol_type = other RNA
  modified_base 1..20: mod_base = OTHER; note = Phosphorothioate linkage
  modified_base 1..4: mod_base = OTHER; note = 2'-O-(2-methoxyethyl) ribonucleotide
  modified_base 5: mod_base = OTHER; note = Locked nucleic acid
  modified_base 6..9: mod_base = OTHER; note = 2'-O-(2-methoxyethyl) ribonucleotide
  modified_base 10: mod_base = OTHER; note = Locked nucleic acid
  modified_base 11..14: mod_base = OTHER; note = 2'-O-(2-methoxyethyl) ribonucleotide
  modified_base 15: mod_base = OTHER; note = Locked nucleic acid
  modified_base 16..20: mod_base = OTHER; note = 2'-O-(2-methoxyethyl) ribonucleotide
  modified_base 7: mod_base = OTHER; note = 5-methyl cytidine
  modified_base 10: mod_base = OTHER; note = 5-methyl cytidine
  modified_base 20: mod_base = OTHER; note = 5-methyl cytidine
gtgaggcatcaggtaagttc

SEQ ID NO: 257 - DNA, 22 bp, synthetic construct
  source 1..22: mol_type = other DNA
  modified_base 1..22: mod_base = OTHER; note = Phosphorothioate linkage
  modified_base 1..6: mod_base = OTHER; note = 2'-O-(2-methoxyethyl) ribonucleotide
  misc_feature 1..6: note = RNA
  misc_feature 7..16: note = DNA
  misc_feature 17..22: note = RNA
  modified_base 17..22: mod_base = OTHER; note = 2'-O-(2-methoxyethyl) ribonucleotide
  modified_base 19: mod_base = OTHER; note = 5-methyl cytidine
gtggatgtagatgaatggcaag

SEQ ID NO: 258 - RNA, 22 nt, synthetic construct
  source 1..22: mol_type = other RNA
  modified_base 1..22: mod_base = OTHER; note = Phosphorothioate linkage
  modified_base 1..22: mod_base = OTHER; note = 2'-O-(2-methoxyethyl) ribonucleotide
  modified_base 19: mod_base = OTHER; note = 5-methyl cytidine
gtggatgtagatgaatggcaag

SEQ ID NO: 259 - DNA, 22 bp, synthetic construct
  source 1..22: mol_type = other DNA
  modified_base 1..22: mod_base = OTHER; note = Phosphorothioate linkage
  modified_base 1..5: mod_base = OTHER; note = 2'-O-(2-methoxyethyl) ribonucleotide
  misc_feature 1..5: note = RNA
  misc_feature 6..8: note = DNA
  misc_feature 9: note = RNA
  modified_base 9: mod_base = OTHER; note = 2'-O-(2-methoxyethyl) ribonucleotide
  misc_feature 10..13: note = DNA
  misc_feature 14: note = RNA
  modified_base 14: mod_base = OTHER; note = 2'-O-(2-methoxyethyl) ribonucleotide
  misc_feature 15..17: note = DNA
  misc_feature 18..22: note = RNA
  modified_base 18..22: mod_base = OTHER; note = 2'-O-(2-methoxyethyl) ribonucleotide
  modified_base 19: mod_base = OTHER; note = 5-methyl cytidine
gtggatgtagatgaatggcaag

SEQ ID NO: 260 - DNA, 22 bp, synthetic construct
  source 1..22: mol_type = other DNA
  modified_base 1..22: mod_base = OTHER; note = Phosphorothioate linkage
  modified_base 1..5: mod_base = OTHER; note = 2'-O-(2-methoxyethyl) ribonucleotide
  modified_base 6: mod_base = OTHER; note = Locked nucleic acid
  misc_feature 1..6: note = RNA
  misc_feature 7..8: note = DNA
  misc_feature 9: note = RNA
  modified_base 9: mod_base = OTHER; note = Locked amino acid
  misc_feature 10..13: note = DNA
  misc_feature 14: note = RNA
  modified_base 14: mod_base = OTHER; note = Locked amino acid
  misc_feature 15..16: note = DNA
  misc_feature 17..22: note = RNA
  modified_base 17: mod_base = OTHER; note = Locked amino acid
  modified_base 18..22: mod_base = OTHER; note = 2'-O-(2-methoxyethyl) ribonucleotide
  modified_base 19: mod_base = OTHER; note = 5-methyl cytidine
gtggatgtagatgaatggcaag

SEQ ID NO: 261 - DNA, 24 bp, synthetic construct
  source 1..24: mol_type = other DNA
  modified_base 1..24: mod_base = OTHER; note = Phosphorothioate linkage
  modified_base 1..7: mod_base = OTHER; note = 2'-O-(2-methoxyethyl) ribonucleotide
  misc_feature 1..7: note = RNA
  misc_feature 8..17: note = DNA
  misc_feature 18..24: note = RNA
  modified_base 18..24: mod_base = OTHER; note = 2'-O-(2-methoxyethyl) ribonucleotide
  modified_base 20: mod_base = OTHER; note = 5-methyl cytidine
tgtggatgtagatgaatggcaagg

SEQ ID NO: 262 - RNA, 24 nt, synthetic construct
  source 1..24: mol_type = other RNA
  modified_base 1..24: mod_base = OTHER; note = Phosphorothioate linkage
  modified_base 1..24: mod_base = OTHER; note = 2'-O-(2-methoxyethyl) ribonucleotide
  modified_base 20: mod_base = OTHER; note = 5-methyl cytidine
tgtggatgtagatgaatggcaagg

SEQ ID NO: 263 - DNA, 24 bp, synthetic construct
  source 1..24: mol_type = other DNA
  modified_base 1..24: mod_base = OTHER; note = Phosphorothioate linkage
  modified_base 1..5: mod_base = OTHER; note = 2'-O-(2-methoxyethyl) ribonucleotide
  misc_feature 1..5: note = RNA
  misc_feature 6..7: note = DNA
  misc_feature 8: note = RNA
  modified_base 8: mod_base = OTHER; note = 2'-O-(2-methoxyethyl) ribonucleotide
  misc_feature 9..10: note = DNA
  misc_feature 11: note = RNA
  modified_base 11: mod_base = OTHER; note = 2'-O-(2-methoxyethyl) ribonucleotide
  misc_feature 12..13: note = DNA
  misc_feature 14: note = RNA
  modified_base 14: mod_base = OTHER; note = 2'-O-(2-methoxyethyl) ribonucleotide
  misc_feature 15..16: note = DNA
  misc_feature 17: note = RNA
  modified_base 17: mod_base = OTHER; note = 2'-O-(2-methoxyethyl) ribonucleotide
  misc_feature 18..19: note = DNA
  misc_feature 20..24: note = RNA
  modified_base 20..24: mod_base = OTHER; note = 2'-O-(2-methoxyethyl) ribonucleotide
  modified_base 20: mod_base = OTHER; note = 5-methyl cytidine
tgtggatgtagatgaatggcaagg

SEQ ID NO: 264 - DNA, 24 bp, synthetic construct
  source 1..24: mol_type = other DNA
  modified_base 1..24: mod_base = OTHER; note = Phosphorothioate linkage
  modified_base 1..5: mod_base = OTHER; note = 2'-O-(2-methoxyethyl) ribonucleotide
  misc_feature 1..5: note = RNA
  misc_feature 6..7: note = DNA
  misc_feature 8: note = RNA
  modified_base 8: mod_base = OTHER; note = Locked nucleic acid
  misc_feature 9..10: note = DNA
  misc_feature 11: note = RNA
  modified_base 11: mod_base = OTHER; note = Locked nucleic acid
  misc_feature 12..13: note = DNA
  misc_feature 14: note = RNA
  modified_base 14: mod_base = OTHER; note = Locked nucleic acid
  misc_feature 15..16: note = DNA
  misc_feature 17: note = RNA
  modified_base 17: mod_base = OTHER; note = Locked nucleic acid
  misc_feature 18..19: note = DNA
  misc_feature 20..24: note = RNA
  modified_base 20..24: mod_base = OTHER; note = 2'-O-(2-methoxyethyl) ribonucleotide
  modified_base 20: mod_base = OTHER; note = 5-methyl cytidine
tgtggatgtagatgaatggcaagg

SEQ ID NO: 265 - DNA, 22 bp, synthetic construct
  source 1..22: mol_type = other DNA
  modified_base 1..22: mod_base = OTHER; note = Phosphorothioate linkage
  modified_base 1..5: mod_base = OTHER; note = 2'-O-(2-methoxyethyl) ribonucleotide
  misc_feature 1..6: note = RNA
  misc_feature 7..16: note = DNA
  misc_feature 17..22: note = RNA
  modified_base 17..22: mod_base = OTHER; note = 2'-O-(2-methoxyethyl) ribonucleotide
  modified_base 4: mod_base = OTHER; note = 5-methyl cytidine
  modified_base 8: mod_base = OTHER; note = 5-methyl cytidine
  modified_base 11: mod_base = OTHER; note = 5-methyl cytidine
  modified_base 21..22: mod_base = OTHER; note = 5-methyl cytidine
agtgaggcatcaggtaagttcc

SEQ ID NO: 266 - RNA, 22 nt, synthetic construct
  source 1..22: mol_type = other RNA
  modified_base 1..22: mod_base = OTHER; note = Phosphorothioate linkage
  modified_base 1..22: mod_base = OTHER; note = 2'-O-(2-methoxyethyl) ribonucleotide
  modified_base 8: mod_base = OTHER; note = 5-methyl cytidine
  modified_base 11: mod_base = OTHER; note = 5-methyl cytidine
  modified_base 21..22: mod_base = OTHER; note = 5-methyl cytidine
agtgaggcatcaggtaagttcc

SEQ ID NO: 267 - DNA, 22 bp, synthetic construct
  source 1..22: mol_type = other DNA
  modified_base 1..22: mod_base = OTHER; note = Phosphorothioate linkage
  modified_base 1..5: mod_base = OTHER; note = 2'-O-(2-methoxyethyl) ribonucleotide
  misc_feature 1..5: note = RNA
  misc_feature 6..8: note = DNA
  misc_feature 9: note = RNA
  modified_base 9: mod_base = OTHER; note = 2'-O-(2-methoxyethyl) ribonucleotide
  misc_feature 10..13: note = DNA
  misc_feature 14: note = RNA
  modified_base 14: mod_base = OTHER; note = 2'-O-(2-methoxyethyl) ribonucleotide
  misc_feature 15..17: note = DNA
  misc_feature 18..22: note = RNA
  modified_base 18..22: mod_base = OTHER; note = 2'-O-(2-methoxyethyl) ribonucleotide
  modified_base 8: mod_base = OTHER; note = 5-methyl cytidine
  modified_base 11: mod_base = OTHER; note = 5-methyl cytidine
  modified_base 21..22: mod_base = OTHER; note = 5-methyl cytidine
agtgaggcatcaggtaagttcc

SEQ ID NO: 268 - DNA, 22 bp, synthetic construct
  source 1..22: mol_type = other DNA
  modified_base 1..22: mod_base = OTHER; note = Phosphorothioate linkage
  modified_base 1..5: mod_base = OTHER; note = 2'-O-(2-methoxyethyl) ribonucleotide
  modified_base 6: mod_base = OTHER; note = Locked nucleic acid
  misc_feature 1..6: note = RNA
  misc_feature 7..8: note = DNA
  misc_feature 9: note = RNA
  misc_feature 10..13: note = DNA
  misc_feature 14: note = RNA
  misc_feature 15..16: note = DNA
  misc_feature 17..22: note = RNA
  modified_base 17: mod_base = OTHER; note = Locked nucleic acid
  modified_base 18..22: mod_base = OTHER; note = 2'-O-(2-methoxyethyl) ribonucleotide
  modified_base 6: mod_base = OTHER; note = 5-methyl cytidine
  modified_base 9: mod_base = OTHER; note = 5-methyl cytidine
  modified_base 14: mod_base = OTHER; note = 5-methyl cytidine
  modified_base 17: mod_base = OTHER; note = 5-methyl cytidine
agtgaggcatcaggtaagttcc

SEQ ID NO: 269 - DNA, 24 bp, synthetic construct
  source 1..24: mol_type = other DNA
  modified_base 1..24: mod_base = OTHER; note = Phosphorothioate linkage
  modified_base 1..7: mod_base = OTHER; note = 2'-O-(2-methoxyethyl) ribonucleotide
  misc_feature 1..7: note = RNA
  misc_feature 8..17: note = DNA
  misc_feature 18..24: note = RNA
  modified_base 18..24: mod_base = OTHER; note = 2'-O-(2-methoxyethyl) ribonucleotide
  modified_base 9: mod_base = OTHER; note = 5-methyl cytidine
  modified_base 12: mod_base = OTHER; note = 5-methyl cytidine
  modified_base 22..23: mod_base = OTHER; note = 5-methyl cytidine
aagtgaggcatcaggtaagttcct

SEQ ID NO: 270 - RNA, 24 nt, synthetic construct
  source 1..24: mol_type = other RNA
  modified_base 1..24: mod_base = OTHER; note = Phosphorothioate linkage
  modified_base 1..24: mod_base = OTHER; note = 2'-O-(2-methoxyethyl) ribonucleotide
  modified_base 9: mod_base = OTHER; note = 5-methyl cytidine
  modified_base 12: mod_base = OTHER; note = 5-methyl cytidine
  modified_base 22..23: mod_base = OTHER; note = 5-methyl cytidine
aagtgaggcatcaggtaagttcct

SEQ ID NO: 271 - DNA, 24 bp, synthetic construct
  source 1..24: mol_type = other DNA
  modified_base 1..24: mod_base = OTHER; note = Phosphorothioate linkage
  modified_base 1..5: mod_base = OTHER; note = 2'-O-(2-methoxyethyl) ribonucleotide
  misc_feature 1..5: note = RNA
  misc_feature 6..7: note = DNA
  misc_feature 8: note = RNA
  modified_base 8: mod_base = OTHER; note = 2'-O-(2-methoxyethyl) ribonucleotide
  misc_feature 9..10: note = DNA
  misc_feature 11: note = RNA
  modified_base 11: mod_base = OTHER; note = 2'-O-(2-methoxyethyl) ribonucleotide
  misc_feature 12..13: note = DNA
  misc_feature 14: note = RNA
  modified_base 14: mod_base = OTHER; note = 2'-O-(2-methoxyethyl) ribonucleotide
  misc_feature 15..16: note = DNA
  misc_feature 17: note = RNA
  modified_base 17: mod_base = OTHER; note = 2'-O-(2-methoxyethyl) ribonucleotide
  misc_feature 18..19: note = DNA
  misc_feature 20..24: note = RNA
  modified_base 20..24: mod_base = OTHER; note = 2'-O-(2-methoxyethyl) ribonucleotide
  modified_base 9: mod_base = OTHER; note = 5-methyl cytidine
  modified_base 12: mod_base = OTHER; note = 5-methyl cytidine
  modified_base 22..23: mod_base = OTHER; note = 5-methyl cytidine
aagtgaggcatcaggtaagttcct

SEQ ID NO: 272 - DNA, 24 bp, synthetic construct
  source 1..24: mol_type = other DNA
  modified_base 1..24: mod_base = OTHER; note = Phosphorothioate linkage
  modified_base 1..5: mod_base = OTHER; note = 2'-O-(2-methoxyethyl) ribonucleotide
  misc_feature 1..5: note = RNA
  misc_feature 6..7: note = DNA
  misc_feature 8: note = RNA
  modified_base 8: mod_base = OTHER; note = Locked nucleic acid
  misc_feature 9..10: note = DNA
  misc_feature 11: note = RNA
  modified_base 11: mod_base = OTHER; note = Locked nucleic acid
  misc_feature 12..13: note = DNA
  misc_feature 14: note = RNA
  modified_base 14: mod_base = OTHER; note = Locked nucleic acid
  misc_feature 15..16: note = DNA
  misc_feature 17: note = RNA
  modified_base 17: mod_base = OTHER; note = Locked nucleic acid
  misc_feature 18..19: note = DNA
  misc_feature 20..24: note = RNA
  modified_base 20..24: mod_base = OTHER; note = 2'-O-(2-methoxyethyl) ribonucleotide
  modified_base 9: mod_base = OTHER; note = 5-methyl cytidine
  modified_base 12: mod_base = OTHER; note = 5-methyl cytidine
  modified_base 22..23: mod_base = OTHER; note = 5-methyl cytidine
aagtgaggcatcaggtaagttcct

SEQ ID NO: 273 - RNA, 20 nt, synthetic construct
  source 1..20: mol_type = other RNA
  modified_base 1..20: mod_base = OTHER; note = Phosphorothioate linkage
  modified_base 1..20: mod_base = OTHER; note = 2'-O-(2-methoxyethyl) ribonucleotide
  modified_base 13..14: mod_base = OTHER; note = 5-methyl cytidine
  modified_base 18: mod_base = OTHER; note = 5-methyl cytidine
tggaaaataatgcctttcta

SEQ ID NO: 274 - DNA, 20 bp, synthetic construct
  source 1..20: mol_type = other DNA
  modified_base 1..20: mod_base = OTHER; note = Phosphorothioate linkage
  modified_base 1..5: mod_base = OTHER; note = 2'-O-(2-methoxyethyl) ribonucleotide
  misc_feature 1..5: note = RNA
  misc_feature 6..15: note = DNA
  misc_feature 16..20: note = RNA
  modified_base 16..20: mod_base = OTHER; note = 2'-O-(2-methoxyethyl) ribonucleotide
  modified_base 2: mod_base = OTHER; note = 5-methyl cytidine
  modified_base 15..16: mod_base = OTHER; note = 5-methyl cytidine
  modified_base 20: mod_base = OTHER; note = 5-methyl cytidine
tctggaaaataatgcctttc

SEQ ID NO: 275 - RNA, 20 nt, synthetic construct
  source 1..20: mol_type = other RNA
  modified_base 1..20: mod_base = OTHER; note = Phosphorothioate linkage
  modified_base 1..20: mod_base = OTHER; note = 2'-O-(2-methoxyethyl) ribonucleotide
  modified_base 1: mod_base = OTHER; note = 5-methyl cytidine
  modified_base 6: mod_base = OTHER; note = 5-methyl cytidine
  modified_base 19..20: mod_base = OTHER; note = 5-methyl cytidine
cttatctggaaaataatgcc

SEQ ID NO: 276 - RNA, 20 nt, synthetic construct
  source 1..20: mol_type = other RNA
  modified_base 1..20: mod_base = OTHER; note = Phosphorothioate linkage
  modified_base 1..20: mod_base = OTHER; note = 2'-O-(2-methoxyethyl) ribonucleotide
  modified_base 2: mod_base = OTHER; note = 5-methyl cytidine
  modified_base 7: mod_base = OTHER; note = 5-methyl cytidine
  modified_base 20: mod_base = OTHER; note = 5-methyl cytidine
gcttatctggaaaataatgc

SEQ ID NO: 277 - RNA, 20 nt, synthetic construct
  source 1..20: mol_type = other RNA
  modified_base 1..20: mod_base = OTHER; note = Phosphorothioate linkage
  modified_base 1..20: mod_base = OTHER; note = 2'-O-(2-methoxyethyl) ribonucleotide
  modified_base 7: mod_base = OTHER; note = 5-methyl cytidine
  modified_base 12: mod_base = OTHER; note = 5-methyl cytidine
agtgagcttatctggaaaat

SEQ ID NO: 278 - RNA, 20 nt, synthetic construct
  source 1..20: mol_type = other RNA
  modified_base 1..20: mod_base = OTHER; note = Phosphorothioate linkage
  modified_base 1..20: mod_base = OTHER; note = 2'-O-(2-methoxyethyl) ribonucleotide
  modified_base 2: mod_base = OTHER; note = 5-methyl cytidine
  modified_base 9: mod_base = OTHER; note = 5-methyl cytidine
  modified_base 14: mod_base = OTHER; note = 5-methyl cytidine
acagtgagcttatctggaaa

SEQ ID NO: 279 - RNA, 20 nt, synthetic construct
  source 1..20: mol_type = other RNA
  modified_base 1..20: mod_base = OTHER; note = Phosphorothioate linkage
  modified_base 1..20: mod_base = OTHER; note = 2'-O-(2-methoxyethyl) ribonucleotide
  modified_base 1: mod_base = OTHER; note = 5-methyl cytidine
  modified_base 4: mod_base = OTHER; note = 5-methyl cytidine
  modified_base 11: mod_base = OTHER; note = 5-methyl cytidine
  modified_base 16: mod_base = OTHER; note = 5-methyl cytidine
cgacagtgagcttatctgga

SEQ ID NO: 280 - RNA, 20 nt, synthetic construct
  source 1..20: mol_type = other RNA
  modified_base 1..20: mod_base = OTHER; note = Phosphorothioate linkage
  modified_base 1..20: mod_base = OTHER; note = 2'-O-(2-methoxyethyl) ribonucleotide
  modified_base 2..3: mod_base = OTHER; note = 5-methyl cytidine
  modified_base 6: mod_base = OTHER; note = 5-methyl cytidine
  modified_base 13: mod_base = OTHER; note = 5-methyl cytidine
  modified_base 18: mod_base = OTHER; note = 5-methyl cytidine
accgacagtgagcttatctg

SEQ ID NO: 281 - RNA, 20 nt, synthetic construct
  source 1..20: mol_type = other RNA
  modified_base 1..20: mod_base = OTHER; note = Phosphorothioate linkage
  modified_base 1..20: mod_base = OTHER; note = 2'-O-(2-methoxyethyl) ribonucleotide
  modified_base 3: mod_base = OTHER; note = 5-methyl cytidine
  modified_base 5: mod_base = OTHER; note = 5-methyl cytidine
  modified_base 11: mod_base = OTHER; note = 5-methyl cytidine
  modified_base 18: mod_base = OTHER; note = 5-methyl cytidine
atcgctgtggcagttaactt

SEQ ID NO: 282 - RNA, 20 nt, synthetic construct
  source 1..20: mol_type = other RNA
  modified_base 1..20: mod_base = OTHER; note = Phosphorothioate linkage
  modified_base 1..20: mod_base = OTHER; note = 2'-O-(2-methoxyethyl) ribonucleotide
  modified_base 6: mod_base = OTHER; note = 5-methyl cytidine
  modified_base 8: mod_base = OTHER; note = 5-methyl cytidine
  modified_base 14: mod_base = OTHER; note = 5-methyl cytidine
agaatcgctgtggcagttaa

SEQ ID NO: 283 - RNA, 20 nt, synthetic construct
  source 1..20: mol_type = other RNA
  modified_base 1..20: mod_base = OTHER; note = Phosphorothioate linkage
  modified_base 1..20: mod_base = OTHER; note = 2'-O-(2-methoxyethyl) ribonucleotide
  modified_base 8: mod_base = OTHER; note = 5-methyl cytidine
  modified_base 10: mod_base = OTHER; note = 5-methyl cytidine
  modified_base 16: mod_base = OTHER; note = 5-methyl cytidine
aaagaatcgctgtggcagtt

SEQ ID NO: 284 - RNA, 20 nt, synthetic construct
  source 1..20: mol_type = other RNA
  modified_base 1..20: mod_base = OTHER; note = Phosphorothioate linkage
  modified_base 1..20: mod_base = OTHER; note = 2'-O-(2-methoxyethyl) ribonucleotide
  modified_base 2: mod_base = OTHER; note = 5-methyl cytidine
  modified_base 10: mod_base = OTHER; note = 5-methyl cytidine
  modified_base 12: mod_base = OTHER; note = 5-methyl cytidine
  modified_base 18: mod_base = OTHER; note = 5-methyl cytidine
acaaagaatcgctgtggcag

SEQ ID NO: 285 - RNA, 20 nt, synthetic construct
  source 1..20: mol_type = other RNA
  modified_base 1..20: mod_base = OTHER; note = Phosphorothioate linkage
  modified_base 1..20: mod_base = OTHER; note = 2'-O-(2-methoxyethyl) ribonucleotide
  modified_base 5: mod_base = OTHER; note = 5-methyl cytidine
  modified_base 13: mod_base = OTHER; note = 5-methyl cytidine
  modified_base 15: mod_base = OTHER; note = 5-methyl cytidine
gagacaaagaatcgctgtgg

SEQ ID NO: 286 - RNA, 20 nt, synthetic construct
  source 1..20: mol_type = other RNA
  modified_base 1..20: mod_base = OTHER; note = Phosphorothioate linkage
  modified_base 1..20: mod_base = OTHER; note = 2'-O-(2-methoxyethyl) ribonucleotide
  modified_base 8: mod_base = OTHER; note = 5-methyl cytidine
  modified_base 16: mod_base = OTHER; note = 5-methyl cytidine
  modified_base 18: mod_base = OTHER; note = 5-methyl cytidine
ttagagacaaagaatcgctg

SEQ ID NO: 287 - DNA, 20 bp, synthetic construct
  source 1..20: mol_type = other DNA
  modified_base 1..20: mod_base = OTHER; note = Phosphorothioate linkage
  modified_base 1..5: mod_base = OTHER; note = 2'-O-(2-methoxyethyl) ribonucleotide
  misc_feature 1..5: note = RNA
  misc_feature 6..15: note = DNA
  misc_feature 16..20: note = RNA
  modified_base 16..20: mod_base = OTHER; note = 2'-O-(2-methoxyethyl) ribonucleotide
  modified_base 1: mod_base = OTHER; note = 5-methyl cytidine
  modified_base 11: mod_base = OTHER; note = 5-methyl cytidine
  modified_base 19: mod_base = OTHER; note = 5-methyl cytidine
catttagagacaaagaatcg

SEQ ID NO: 288 - RNA, 20 nt, synthetic construct
  source 1..20: mol_type = other RNA
  modified_base 1..20: mod_base = OTHER; note = Phosphorothioate linkage
  modified_base 1..20: mod_base = OTHER; note = 2'-O-(2-methoxyethyl) ribonucleotide
  modified_base 4: mod_base = OTHER; note = 5-methyl cytidine
  modified_base 14: mod_base = OTHER; note = 5-methyl cytidine
gtacatttagagacaaagaa

SEQ ID NO: 289 - RNA, 20 nt, synthetic construct
  source 1..20: mol_type = other RNA
  modified_base 1..20: mod_base = OTHER; note = Phosphorothioate linkage
  modified_base 1..20: mod_base = OTHER; note = 2'-O-(2-methoxyethyl) ribonucleotide
  modified_base 1: mod_base = OTHER; note = 5-methyl cytidine
  modified_base 6: mod_base = OTHER; note = 5-methyl cytidine
  modified_base 16: mod_base = OTHER; note = 5-methyl cytidine
ctgtacatttagagacaaag

SEQ ID NO: 290 - RNA, 20 nt, synthetic construct
  source 1..20: mol_type = other RNA
  modified_base 1..20: mod_base = OTHER; note = Phosphorothioate linkage
  modified_base 1..20: mod_base = OTHER; note = 2'-O-(2-methoxyethyl) ribonucleotide
  modified_base 3: mod_base = OTHER; note = 5-methyl cytidine
  modified_base 8: mod_base = OTHER; note = 5-methyl cytidine
  modified_base 18: mod_base = OTHER; note = 5-methyl cytidine
aactgtacatttagagacaa

SEQ ID NO: 291 - RNA, 20 nt, synthetic construct
  source 1..20: mol_type = other RNA
  modified_base 1..20: mod_base = OTHER; note = Phosphorothioate linkage
  modified_base 1..20: mod_base = OTHER; note = 2'-O-(2-methoxyethyl) ribonucleotide
  modified_base 9: mod_base = OTHER; note = 5-methyl cytidine
  modified_base 14: mod_base = OTHER; note = 5-methyl cytidine
ggaaagaactgtacatttag

SEQ ID NO: 292 - RNA, 20 nt, synthetic construct
  source 1..20: mol_type = other RNA
  modified_base 1..20: mod_base = OTHER; note = Phosphorothioate linkage
  modified_base 1..20: mod_base = OTHER; note = 2'-O-(2-methoxyethyl) ribonucleotide
  modified_base 13: mod_base = OTHER; note = 5-methyl cytidine
  modified_base 17..18: mod_base = OTHER; note = 5-methyl cytidine
aagaggaaagaactggccgg

SEQ ID NO: 293 - RNA, 20 nt, synthetic construct
  source 1..20: mol_type = other RNA
  modified_base 1..20: mod_base = OTHER; note = Phosphorothioate linkage
  modified_base 1..20: mod_base = OTHER; note = 2'-O-(2-methoxyethyl) ribonucleotide
  modified_base 3: mod_base = OTHER; note = 5-methyl cytidine
  modified_base 16: mod_base = OTHER; note = 5-methyl cytidine
  modified_base 20: mod_base = OTHER; note = 5-methyl cytidine
gtcaagaggaaagaactggc

SEQ ID NO: 294 - RNA, 20 nt, synthetic construct
  source 1..20: mol_type = other RNA
  modified_base 1..20: mod_base = OTHER; note = Phosphorothioate linkage
  modified_base 1..20: mod_base = OTHER; note = 2'-O-(2-methoxyethyl) ribonucleotide
  modified_base 1: mod_base = OTHER; note = 5-methyl cytidine
  modified_base 7: mod_base = OTHER; note = 5-methyl cytidine
  modified_base 20: mod_base = OTHER; note = 5-methyl cytidine
cttggtcaagaggaaagaac

SEQ ID NO: 295 - RNA, 20 nt, synthetic construct
  source 1..20: mol_type = other RNA
  modified_base 1..20: mod_base = OTHER; note = Phosphorothioate linkage
  modified_base 1..20: mod_base = OTHER; note = 2'-O-(2-methoxyethyl) ribonucleotide
  modified_base 4: mod_base = OTHER; note = 5-methyl cytidine
  modified_base 10: mod_base = OTHER; note = 5-methyl cytidine
ttgcttggtcaagaggaaag

SEQ ID NO: 296 - RNA, 20 nt, synthetic construct
  source 1..20: mol_type = other RNA
  modified_base 1..20: mod_base = OTHER; note = Phosphorothioate linkage
  modified_base 1..20: mod_base = OTHER; note = 2'-O-(2-methoxyethyl) ribonucleotide
  modified_base 6: mod_base = OTHER; note = 5-methyl cytidine
  modified_base 12: mod_base = OTHER; note = 5-methyl cytidine
ttttgcttggtcaagaggaa

SEQ ID NO: 297 - DNA, 20 bp, synthetic construct
  source 1..20: mol_type = other DNA
  modified_base 1..20: mod_base = OTHER; note = Phosphorothioate linkage
  modified_base 1..5: mod_base = OTHER; note = 2'-O-(2-methoxyethyl) ribonucleotide
  misc_feature 1..5: note = RNA
  misc_feature 6..15: note = DNA
  misc_feature 16..20: note = RNA
  modified_base 16..20: mod_base = OTHER; note = 2'-O-(2-methoxyethyl) ribonucleotide
  modified_base 8: mod_base = OTHER; note = 5-methyl cytidine
  modified_base 14: mod_base = OTHER; note = 5-methyl cytidine
tgttttgcttggtcaagagg

SEQ ID NO: 298 - RNA, 20 nt, synthetic construct
  source 1..20: mol_type = other RNA
  modified_base 1..20: mod_base = OTHER; note = Phosphorothioate linkage
  modified_base 1..20: mod_base = OTHER; note = 2'-O-(2-methoxyethyl) ribonucleotide
  modified_base 10: mod_base = OTHER; note = 5-methyl cytidine
  modified_base 16: mod_base = OTHER; note = 5-methyl cytidine
tgtgttttgcttggtcaaga

SEQ ID NO: 299 - RNA, 20 nt, synthetic construct
  source 1..20: mol_type = other RNA
  modified_base 1..20: mod_base = OTHER; note = Phosphorothioate linkage
  modified_base 1..20: mod_base = OTHER; note = 2'-O-(2-methoxyethyl) ribonucleotide
  modified_base 14: mod_base = OTHER; note = 5-methyl cytidine
  modified_base 20: mod_base = OTHER; note = 5-methyl cytidine
gagttgtgttttgcttggtc

SEQ ID NO: 300 - RNA, 20 nt, synthetic construct
  source 1..20: mol_type = other RNA
  modified_base 1..20: mod_base = OTHER; note = Phosphorothioate linkage
  modified_base 1..20: mod_base = OTHER; note = 2'-O-(2-methoxyethyl) ribonucleotide
  modified_base 16: mod_base = OTHER; note = 5-methyl cytidine
tggagttgtgttttgcttgg

SEQ ID NO: 301 - RNA, 20 nt, synthetic construct
  source 1..20: mol_type = other RNA
  modified_base 1..20: mod_base = OTHER; note = Phosphorothioate linkage
  modified_base 1..20: mod_base = OTHER; note = 2'-O-(2-methoxyethyl) ribonucleotide
  modified_base 3: mod_base = OTHER; note = 5-methyl cytidine
  modified_base 19: mod_base = OTHER; note = 5-methyl cytidine
tactggagttgtgttttgct

SEQ ID NO: 302 - RNA, 20 nt, synthetic construct
  source 1..20: mol_type = other RNA
  modified_base 1..20: mod_base = OTHER; note = Phosphorothioate linkage
  modified_base 1..20: mod_base = OTHER; note = 2'-O-(2-methoxyethyl) ribonucleotide
  modified_base 7..11: mod_base = OTHER; note = 5-methyl cytidine
  modified_base 14: mod_base = OTHER; note = 5-methyl cytidine
  modified_base 19: mod_base = OTHER; note = 5-methyl cytidine
ttggttccccctgctgtgct

SEQ ID NO: 303 - RNA, 20 nt, synthetic construct
  source 1..20: mol_type = other RNA
  modified_base 1..20: mod_base = OTHER; note = Phosphorothioate linkage
  modified_base 1..20: mod_base = OTHER; note = 2'-O-(2-methoxyethyl) ribonucleotide
  modified_base 2..3: mod_base = OTHER; note = 5-methyl cytidine
  modified_base 10..14: mod_base = OTHER; note = 5-methyl cytidine
  modified_base 17: mod_base = OTHER; note = 5-methyl cytidine
accttggttccccctgctgt

SEQ ID NO: 304 - RNA, 20 nt, synthetic construct
  source 1..20: mol_type = other RNA
  modified_base 1..20: mod_base = OTHER; note = Phosphorothioate linkage
  modified_base 1..20: mod_base = OTHER; note = 2'-O-(2-methoxyethyl) ribonucleotide
  modified_base 2: mod_base = OTHER; note = 5-methyl cytidine
  modified_base 4..5: mod_base = OTHER; note = 5-methyl cytidine
  modified_base 12..16: mod_base = OTHER; note = 5-methyl cytidine
  modified_base 19: mod_base = OTHER; note = 5-methyl cytidine
tcaccttggttccccctgct

SEQ ID NO: 305 - RNA, 20 nt, synthetic construct
  source 1..20: mol_type = other RNA
  modified_base 1..20: mod_base = OTHER; note = Phosphorothioate linkage
  modified_base 1..20: mod_base = OTHER; note = 2'-O-(2-methoxyethyl) ribonucleotide
  modified_base 1..2: mod_base = OTHER; note = 5-methyl cytidine
  modified_base 4: mod_base = OTHER; note = 5-methyl cytidine
  modified_base 6..7: mod_base = OTHER; note = 5-methyl cytidine
  modified_base 14..18: mod_base = OTHER; note = 5-methyl cytidine
cctcaccttggttccccctg

SEQ ID NO: 306 - DNA, 20 bp, synthetic construct
  source 1..20: mol_type = other DNA
  modified_base 1..20: mod_base = OTHER; note = Phosphorothioate linkage
  modified_base 1..5: mod_base = OTHER; note = 2'-O-(2-methoxyethyl) ribonucleotide
  misc_feature 1..5: note = RNA
  misc_feature 6..15: note = DNA
  misc_feature 16..20: note = RNA
  modified_base 16..20: mod_base = OTHER; note = 2'-O-(2-methoxyethyl) ribonucleotide
  modified_base 2..7: mod_base = OTHER; note = 5-methyl cytidine
  modified_base 9: mod_base = OTHER; note = 5-methyl cytidine
  modified_base 11..12: mod_base = OTHER; note = 5-methyl cytidine
  modified_base 19..20: mod_base = OTHER; note = 5-methyl cytidine
acccccctcaccttggttcc

SEQ ID NO: 307 - RNA, 20 nt, synthetic construct
  source 1..20: mol_type = other RNA
  modified_base 1..20: mod_base = OTHER; note = Phosphorothioate linkage
  modified_base 1..20: mod_base = OTHER; note = 2'-O-(2-methoxyethyl) ribonucleotide
  modified_base 2: mod_base = OTHER; note = 5-methyl cytidine
  modified_base 4..9: mod_base = OTHER; note = 5-methyl cytidine
  modified_base 11: mod_base = OTHER; note = 5-methyl cytidine
  modified_base 13..14: mod_base = OTHER; note = 5-methyl cytidine
tcacccccctcaccttggtt

SEQ ID NO: 308 - RNA, 20 nt, synthetic construct
  source 1..20: mol_type = other RNA
  modified_base 1..20: mod_base = OTHER; note = Phosphorothioate linkage
  modified_base 1..20: mod_base = OTHER; note = 2'-O-(2-methoxyethyl) ribonucleotide
  modified_base 3: mod_base = OTHER; note = 5-methyl cytidine
  modified_base 5: mod_base = OTHER; note = 5-methyl cytidine
  modified_base 7..12: mod_base = OTHER; note = 5-methyl cytidine
  modified_base 14: mod_base = OTHER; note = 5-methyl cytidine
  modified_base 16..17: mod_base = OTHER; note = 5-methyl cytidine
tgctcacccccctcaccttg

SEQ ID NO: 309 - RNA, 20 nt, synthetic construct
  source 1..20: mol_type = other RNA
  modified_base 1..20: mod_base = OTHER; note = Phosphorothioate linkage
  modified_base 1..20: mod_base = OTHER; note = 2'-O-(2-methoxyethyl) ribonucleotide
  modified_base 2: mod_base = OTHER; note = 5-methyl cytidine
  modified_base 5: mod_base = OTHER; note = 5-methyl cytidine
  modified_base 7: mod_base = OTHER; note = 5-methyl cytidine
  modified_base 9..14: mod_base = OTHER; note = 5-methyl cytidine
  modified_base 16: mod_base = OTHER; note = 5-methyl cytidine
  modified_base 18..19: mod_base = OTHER; note = 5-methyl cytidine
actgctcacccccctcacct

SEQ ID NO: 310 - DNA, 20 bp, synthetic construct
  source 1..20: mol_type = other DNA
  modified_base 1..20: mod_base = OTHER; note = Phosphorothioate linkage
  modified_base 1..5: mod_base = OTHER; note = 2'-O-(2-methoxyethyl) ribonucleotide
  modified_base 6: mod_base = OTHER; note = Locked nucleic acid
  misc_feature 1..6: note = RNA
  misc_feature 7..8: note = DNA
  misc_feature 9: note = RNA
  modified_base 9: mod_base = OTHER; note = Locked nucleic acid
  misc_feature 10..11: note = DNA
  misc_feature 12: note = RNA
  modified_base 12: mod_base = OTHER; note = Locked nucleic acid
  misc_feature 13..14: note = DNA
  misc_feature 15..20: note = RNA
  modified_base 15: mod_base = OTHER; note = Locked amino acid
  modified_base 16..20: mod_base = OTHER; note = 2'-O-(2-methoxyethyl) ribonucleotide
  modified_base 2: mod_base = OTHER; note = 5-methyl cytidine
  modified_base 15..16: mod_base = OTHER; note = 5-methyl cytidine
  modified_base 20: mod_base = OTHER; note = 5-methyl cytidine
tctggaaaataatgcctttc

SEQ ID NO: 311 - DNA, 20 bp, synthetic construct
  source 1..20: mol_type = other DNA
  modified_base 1..20: mod_base = OTHER; note = Phosphorothioate linkage
  modified_base 1..3: mod_base = OTHER; note = 2'-O-(2-methoxyethyl) ribonucleotide
  modified_base 4: mod_base = OTHER; note = Locked nucleic acid
  modified_base 5: mod_base = OTHER; note = 2'-O-(2-methoxyethyl) ribonucleotide
  misc_feature 1..5: note = RNA
  misc_feature 6..7: note = DNA
  misc_feature 8: note = RNA
  modified_base 8: mod_base = OTHER; note = Locked amino acid
  misc_feature 9..11: note = DNA
  misc_feature 12: note = RNA
  modified_base 12: mod_base = OTHER; note = Locked amino acid
  misc_feature 13..15: note = DNA
  modified_base 16: mod_base = OTHER; note = Locked amino acid
  misc_feature 16..20: note = RNA
  modified_base 17..20: mod_base = OTHER; note = 2'-O-(2-methoxyethyl) ribonucleotide
  modified_base 2: mod_base = OTHER; note = 5-methyl cytidine
  modified_base 15..16: mod_base = OTHER; note = 5-methyl cytidine
  modified_base 20: mod_base = OTHER; note = 5-methyl cytidine
tctggaaaataatgcctttc

SEQ ID NO: 312 - DNA, 20 bp, synthetic construct
  source 1..20: mol_type = other DNA
  modified_base 1..20: mod_base = OTHER; note = Phosphorothioate linkage
  modified_base 1..4: mod_base = OTHER; note = 2'-O-(2-methoxyethyl) ribonucleotide
  modified_base 5: mod_base = OTHER; note = Locked nucleic acid
  misc_feature 1..5: note = RNA
  misc_feature 6..8: note = DNA
  misc_feature 9: note = RNA
  modified_base 9: mod_base = OTHER; note = Locked amino acid
  misc_feature 10..12: note = DNA
  misc_feature 13: note = RNA
  modified_base 13: mod_base = OTHER; note = Locked amino acid
  misc_feature 14..15: note = DNA
  misc_feature 16..20: note = RNA
  modified_base 16: mod_base = OTHER; note = 2'-O-(2-methoxyethyl) ribonucleotide
  modified_base 17: mod_base = OTHER; note = Locked amino acid
  modified_base 18..20: mod_base = OTHER; note = 2'-O-(2-methoxyethyl) ribonucleotide
  modified_base 2: mod_base = OTHER; note = 5-methyl cytidine
  modified_base 15..16: mod_base = OTHER; note = 5-methyl cytidine
  modified_base 20: mod_base = OTHER; note = 5-methyl cytidine
tctggaaaataatgcctttc

SEQ ID NO: 313 - RNA, 20 nt, synthetic construct
  source 1..20: mol_type = other RNA
  modified_base 1..20: mod_base = OTHER; note = Phosphorothioate linkage
  modified_base 1..3: mod_base = OTHER; note = 2'-O-(2-methoxyethyl) ribonucleotide
  modified_base 4: mod_base = OTHER; note = Locked nucleic acid
  modified_base 5: mod_base = OTHER; note = 2'-O-(2-methoxyethyl) ribonucleotide
  modified_base 6: mod_base = OTHER; note = Locked nucleic acid
  modified_base 7: mod_base = OTHER; note = 2'-O-(2-methoxyethyl) ribonucleotide
  modified_base 8: mod_base = OTHER; note = Locked nucleic acid
  modified_base 9: mod_base = OTHER; note = 2'-O-(2-methoxyethyl) ribonucleotide
  modified_base 10: mod_base = OTHER; note = Locked nucleic acid
  modified_base 11: mod_base = OTHER; note = 2'-O-(2-methoxyethyl) ribonucleotide
  modified_base 12: mod_base = OTHER; note = Locked nucleic acid
  modified_base 13: mod_base = OTHER; note = 2'-O-(2-methoxyethyl) ribonucleotide
  modified_base 14: mod_base = OTHER; note = Locked nucleic acid
  modified_base 15: mod_base = OTHER; note = 2'-O-(2-methoxyethyl) ribonucleotide
  modified_base 16: mod_base = OTHER; note = Locked nucleic acid
  modified_base 17: mod_base = OTHER; note = 2'-O-(2-methoxyethyl) ribonucleotide
  modified_base 18: mod_base = OTHER; note = Locked nucleic acid
  modified_base 19..20: mod_base = OTHER; note = 2'-O-(2-methoxyethyl) ribonucleotide
  modified_base 2: mod_base = OTHER; note = 5-methyl cytidine
  modified_base 15: mod_base = OTHER; note = 5-methyl cytidine
  modified_base 20: mod_base = OTHER; note = 5-methyl cytidine
tctggaaaataatgcctttc

SEQ ID NO: 314 - RNA, 20 nt, synthetic construct
  source 1..20: mol_type = other RNA
  modified_base 1..20: mod_base = OTHER; note = Phosphorothioate linkage
  modified_base 1..2: mod_base = OTHER; note = 2'-O-(2-methoxyethyl) ribonucleotide
  modified_base 3: mod_base = OTHER; note = Locked nucleic acid
  modified_base 4: mod_base = OTHER; note = 2'-O-(2-methoxyethyl) ribonucleotide
  modified_base 5: mod_base = OTHER; note = Locked nucleic acid
  modified_base 6: mod_base = OTHER; note = 2'-O-(2-methoxyethyl) ribonucleotide
  modified_base 7: mod_base = OTHER; note = Locked nucleic acid
  modified_base 8: mod_base = OTHER; note = 2'-O-(2-methoxyethyl) ribonucleotide
  modified_base 9: mod_base = OTHER; note = Locked nucleic acid
  modified_base 10: mod_base = OTHER; note = 2'-O-(2-methoxyethyl) ribonucleotide
  modified_base 11: mod_base = OTHER; note = Locked nucleic acid
  modified_base 12: mod_base = OTHER; note = 2'-O-(2-methoxyethyl) ribonucleotide
  modified_base 13: mod_base = OTHER; note = Locked nucleic acid
  modified_base 14: mod_base = OTHER; note = 2'-O-(2-methoxyethyl) ribonucleotide
  modified_base 15: mod_base = OTHER; note = Locked nucleic acid
  modified_base 16: mod_base = OTHER; note = 2'-O-(2-methoxyethyl) ribonucleotide
  modified_base 17: mod_base = OTHER; note = Locked nucleic acid
  modified_base 18..20: mod_base = OTHER; note = 2'-O-(2-methoxyethyl) ribonucleotide
  modified_base 2: mod_base = OTHER; note = 5-methyl cytidine
  modified_base 15..16: mod_base = OTHER; note = 5-methyl cytidine
  modified_base 20: mod_base = OTHER; note = 5-methyl cytidine
tctggaaaataatgcctttc

SEQ ID NO: 315 - RNA, 20 nt, synthetic construct
  source 1..20: mol_type = other RNA
  modified_base 1..20: mod_base = OTHER; note = Phosphorothioate linkage
  modified_base 1..2: mod_base = OTHER; note = 2'-O-(2-methoxyethyl) ribonucleotide
  modified_base 3: mod_base = OTHER; note = Locked nucleic acid
  modified_base 4..5: mod_base = OTHER; note = 2'-O-(2-methoxyethyl) ribonucleotide
  modified_base 6: mod_base = OTHER; note = Locked nucleic acid
  modified_base 7..8: mod_base = OTHER; note = 2'-O-(2-methoxyethyl) ribonucleotide
  modified_base 9: mod_base = OTHER; note = Locked nucleic acid
  modified_base 10..11: mod_base = OTHER; note = 2'-O-(2-methoxyethyl) ribonucleotide
  modified_base 12: mod_base = OTHER; note = Locked nucleic acid
  modified_base 13..14: mod_base = OTHER; note = 2'-O-(2-methoxyethyl) ribonucleotide
  modified_base 15: mod_base = OTHER; note = Locked nucleic acid
  modified_base 16..17: mod_base = OTHER; note = 2'-O-(2-methoxyethyl) ribonucleotide
  modified_base 18: mod_base = OTHER; note = Locked nucleic acid
  modified_base 19..20: mod_base = OTHER; note = 2'-O-(2-methoxyethyl) ribonucleotide
  modified_base 16: mod_base = OTHER; note = Locked nucleic acid
  modified_base 17: mod_base = OTHER; note = 2'-O-(2-methoxyethyl) ribonucleotide
  modified_base 18: mod_base = OTHER; note = Locked nucleic acid
  modified_base 19..20: mod_base = OTHER; note = 2'-O-(2-methoxyethyl) ribonucleotide
  modified_base 2: mod_base = OTHER; note = 5-methyl cytidine
  modified_base 16: mod_base = OTHER; note = 5-methyl cytidine
  modified_base 20: mod_base = OTHER; note = 5-methyl cytidine
tctggaaaataatgcctttc

SEQ ID NO: 316 - RNA, 20 nt, synthetic construct
  source 1..20: mol_type = other RNA
  modified_base 1..20: mod_base = OTHER; note = Phosphorothioate linkage
  modified_base 1..4: mod_base = OTHER; note = 2'-O-(2-methoxyethyl) ribonucleotide
  modified_base 5: mod_base = OTHER; note = Locked nucleic acid
  modified_base 6..8: mod_base = OTHER; note = 2'-O-(2-methoxyethyl) ribonucleotide
  modified_base 9: mod_base = OTHER; note = Locked nucleic acid
  modified_base 10..12: mod_base = OTHER; note = 2'-O-(2-methoxyethyl) ribonucleotide
  modified_base 13: mod_base = OTHER; note = Locked nucleic acid
  modified_base 14..16: mod_base = OTHER; note = 2'-O-(2-methoxyethyl) ribonucleotide
  modified_base 17: mod_base = OTHER; note = Locked nucleic acid
  modified_base 18..20: mod_base = OTHER; note = 2'-O-(2-methoxyethyl) ribonucleotide
  modified_base 2: mod_base = OTHER; note = 5-methyl cytidine
  modified_base 15..16: mod_base = OTHER; note = 5-methyl cytidine
  modified_base 20: mod_base = OTHER; note = 5-methyl cytidine
tctggaaaataatgcctttc

SEQ ID NO: 317 - RNA, 20 nt, synthetic construct
  source 1..20: mol_type = other RNA
  modified_base 1..20: mod_base = OTHER; note = Phosphorothioate linkage
  modified_base 1..3: mod_base = OTHER; note = 2'-O-(2-methoxyethyl) ribonucleotide
  modified_base 4: mod_base = OTHER; note = Locked nucleic acid
  modified_base 5..7: mod_base = OTHER; note = 2'-O-(2-methoxyethyl) ribonucleotide
  modified_base 8: mod_base = OTHER; note = Locked nucleic acid
  modified_base 9..11: mod_base = OTHER; note = 2'-O-(2-methoxyethyl) ribonucleotide
  modified_base 12: mod_base = OTHER; note = Locked nucleic acid
  modified_base 13..15: mod_base = OTHER; note = 2'-O-(2-methoxyethyl) ribonucleotide
  modified_base 16: mod_base = OTHER; note = Locked nucleic acid
  modified_base 17..20: mod_base = OTHER; note = 2'-O-(2-methoxyethyl) ribonucleotide
  modified_base 2: mod_base = OTHER; note = 5-methyl cytidine
  modified_base 15..16: mod_base = OTHER; note = 5-methyl cytidine
  modified_base 20: mod_base = OTHER; note = 5-methyl cytidine
tctggaaaataatgcctttc

SEQ ID NO: 318 - RNA, 20 nt, synthetic construct
  source 1..20: mol_type = other RNA
  modified_base 1..20: mod_base = OTHER; note = Phosphorothioate linkage
  modified_base 1..5: mod_base = OTHER; note = 2'-O-(2-methoxyethyl) ribonucleotide
  modified_base 6: mod_base = OTHER; note = Locked nucleic acid
  modified_base 5..10: mod_base = OTHER; note = 2'-O-(2-methoxyethyl) ribonucleotide
  modified_base 11: mod_base = OTHER; note = Locked nucleic acid
  modified_base 12..15: mod_base = OTHER; note = 2'-O-(2-methoxyethyl) ribonucleotide
  modified_base 16: mod_base = OTHER; note = Locked nucleic acid
  modified_base 17..20: mod_base = OTHER; note = 2'-O-(2-methoxyethyl) ribonucleotide
  modified_base 2: mod_base = OTHER; note = 5-methyl cytidine
  modified_base 15..16: mod_base = OTHER; note = 5-methyl cytidine
  modified_base 20: mod_base = OTHER; note = 5-methyl cytidine
tctggaaaataatgcctttc

SEQ ID NO: 319 - RNA, 20 nt, synthetic construct
  source 1..20: mol_type = other RNA
  modified_base 1..20: mod_base = OTHER; note = Phosphorothioate linkage
  modified_base 1..4: mod_base = OTHER; note = 2'-O-(2-methoxyethyl) ribonucleotide
  modified_base 5: mod_base = OTHER; note = Locked nucleic acid
  modified_base 6..9: mod_base = OTHER; note = 2'-O-(2-methoxyethyl) ribonucleotide
  modified_base 10: mod_base = OTHER; note = Locked nucleic acid
  modified_base 11..14: mod_base = OTHER; note = 2'-O-(2-methoxyethyl) ribonucleotide
  modified_base 15: mod_base = OTHER; note = Locked nucleic acid
  modified_base 16..20: mod_base = OTHER; note = 2'-O-(2-methoxyethyl) ribonucleotide
  modified_base 2: mod_base = OTHER; note = 5-methyl cytidine
  modified_base 15..16: mod_base = OTHER; note = 5-methyl cytidine
  modified_base 20: mod_base = OTHER; note = 5-methyl cytidine
tctggaaaataatgcctttc

SEQ ID NO: 320 - DNA, 20 bp, synthetic construct
  source 1..20: mol_type = other DNA
  modified_base 1..20: mod_base = OTHER; note = Phosphorothioate linkage
  modified_base 1..5: mod_base = OTHER; note = 2'-O-(2-methoxyethyl) ribonucleotide
  modified_base 6: mod_base = OTHER; note = Locked nucleic acid
  misc_feature 1..6: note = RNA
  misc_feature 7..8: note = DNA
  misc_feature 9: note = RNA
  modified_base 9: mod_base = OTHER; note = Locked nucleic acid
  misc_feature 10..11: note = DNA
  misc_feature 12: note = RNA
  modified_base 12: mod_base = OTHER; note = Locked nucleic acid
  misc_feature 13..14: note = DNA
  misc_feature 15..20: note = RNA
  modified_base 15: mod_base = OTHER; note = Locked nucleic acid
  modified_base 16..20: mod_base = OTHER; note = 2'-O-(2-methoxyethyl) ribonucleotide
  modified_base 1: mod_base = OTHER; note = 5-methyl cytidine
  modified_base 11: mod_base = OTHER; note = 5-methyl cytidine
  modified_base 19: mod_base = OTHER; note = 5-methyl cytidine
catttagagacaaagaatcg

SEQ ID NO: 321 - DNA, 20 bp, synthetic construct
  source 1..20: mol_type = other DNA
  modified_base 1..20: mod_base = OTHER; note = Phosphorothioate linkage
  modified_base 1..3: mod_base = OTHER; note = 2'-O-(2-methoxyethyl) ribonucleotide
  modified_base 4: mod_base = OTHER; note = Locked nucleic acid
  modified_base 5: mod_base = OTHER; note = 2'-O-(2-methoxyethyl) ribonucleotide
  misc_feature 1..5: note = RNA
  misc_feature 6..7: note = DNA
  misc_feature 8: note = RNA
  modified_base 8: mod_base = OTHER; note = Locked nucleic acid
  misc_feature 9..11: note = DNA
  misc_feature 12: note = RNA
  modified_base 12: mod_base = OTHER; note = Locked nucleic acid
  misc_feature 13..15: note = DNA
  misc_feature 16..20: note = RNA
  modified_base 16: mod_base = OTHER; note = Locked nucleic acid
  modified_base 17..20: mod_base = OTHER; note = 2'-O-(2-methoxyethyl) ribonucleotide
  modified_base 1: mod_base = OTHER; note = 5-methyl cytidine
  modified_base 11: mod_base = OTHER; note = 5-methyl cytidine
  modified_base 19: mod_base = OTHER; note = 5-methyl cytidine
catttagagacaaagaatcg

SEQ ID NO: 322 - DNA, 20 bp, synthetic construct
  source 1..20: mol_type = other DNA
  modified_base 1..20: mod_base = OTHER; note = Phosphorothioate linkage
  modified_base 1..4: mod_base = OTHER; note = 2'-O-(2-methoxyethyl) ribonucleotide
  modified_base 5: mod_base = OTHER; note = Locked nucleic acid
  misc_feature 1..5: note = RNA
  misc_feature 6..8: note = DNA
  misc_feature 9: note = RNA
  misc_feature 10..12: note = DNA
  misc_feature 13: note = RNA
  misc_feature 14..15: note = DNA
  misc_feature 16..20: note = RNA
  modified_base 16: mod_base = OTHER; note = 2'-O-(2-methoxyethyl) ribonucleotide
  modified_base 17: mod_base = OTHER; note = Locked amino acid
  modified_base 18..20: mod_base = OTHER; note = 2'-O-(2-methoxyethyl) ribonucleotide
  modified_base 1: mod_base = OTHER; note = 5-methyl cytidine
  modified_base 11: mod_base = OTHER; note = 5-methyl cytidine
  modified_base 19: mod_base = OTHER; note = 5-methyl cytidine
catttagagacaaagaatcg

SEQ ID NO: 323 - RNA, 20 nt, synthetic construct
  source 1..20: mol_type = other RNA
  modified_base 1..20: mod_base = OTHER; note = Phosphorothioate linkage
  modified_base 1..3: mod_base = OTHER; note = 2'-O-(2-methoxyethyl) ribonucleotide
  modified_base 4: mod_base = OTHER; note = Locked nucleic acid
  modified_base 5: mod_base = OTHER; note = 2'-O-(2-methoxyethyl) ribonucleotide
  modified_base 6: mod_base = OTHER; note = Locked nucleic acid
  modified_base 7: mod_base = OTHER; note = 2'-O-(2-methoxyethyl) ribonucleotide
  modified_base 8: mod_base = OTHER; note = Locked nucleic acid
  modified_base 9: mod_base = OTHER; note = 2'-O-(2-methoxyethyl) ribonucleotide
  modified_base 10: mod_base = OTHER; note = Locked nucleic acid
  modified_base 11: mod_base = OTHER; note = 2'-O-(2-methoxyethyl) ribonucleotide
  modified_base 12: mod_base = OTHER; note = Locked nucleic acid
  modified_base 13: mod_base = OTHER; note = 2'-O-(2-methoxyethyl) ribonucleotide
  modified_base 14: mod_base = OTHER; note = Locked nucleic acid
  modified_base 15: mod_base = OTHER; note = 2'-O-(2-methoxyethyl) ribonucleotide
  modified_base 16: mod_base = OTHER; note = Locked nucleic acid
  modified_base 17: mod_base = OTHER; note = 2'-O-(2-methoxyethyl) ribonucleotide
  modified_base 18: mod_base = OTHER; note = Locked nucleic acid
  modified_base 19..20: mod_base = OTHER; note = 2'-O-(2-methoxyethyl) ribonucleotide
  modified_base 1: mod_base = OTHER; note = 5-methyl cytidine
  modified_base 11: mod_base = OTHER; note = 5-methyl cytidine
  modified_base 19: mod_base = OTHER; note = 5-methyl cytidine
catttagagacaaagaatcg

SEQ ID NO: 324 - RNA, 20 nt, synthetic construct
  source 1..20: mol_type = other RNA
  modified_base 1..20: mod_base = OTHER; note = Phosphorothioate linkage
  modified_base 1..2: mod_base = OTHER; note = 2'-O-(2-methoxyethyl) ribonucleotide
  modified_base 3: mod_base = OTHER; note = Locked nucleic acid
  modified_base 4: mod_base = OTHER; note = 2'-O-(2-methoxyethyl) ribonucleotide
  modified_base 5: mod_base = OTHER; note = Locked nucleic acid
  modified_base 6: mod_base = OTHER; note = 2'-O-(2-methoxyethyl) ribonucleotide
  modified_base 7: mod_base = OTHER; note = Locked nucleic acid
  modified_base 8: mod_base = OTHER; note = 2'-O-(2-methoxyethyl) ribonucleotide
  modified_base 9: mod_base = OTHER; note = Locked nucleic acid
  modified_base 10: mod_base = OTHER; note = 2'-O-(2-methoxyethyl) ribonucleotide
  modified_base 11: mod_base = OTHER; note = Locked nucleic acid
  modified_base 12: mod_base = OTHER; note = 2'-O-(2-methoxyethyl) ribonucleotide
  modified_base 13: mod_base = OTHER; note = Locked nucleic acid
  modified_base 14: mod_base = OTHER; note = 2'-O-(2-methoxyethyl) ribonucleotide
  modified_base 15: mod_base = OTHER; note = Locked nucleic acid
  modified_base 16: mod_base = OTHER; note = 2'-O-(2-methoxyethyl) ribonucleotide
  modified_base 17: mod_base = OTHER; note = Locked nucleic acid
  modified_base 18..20: mod_base = OTHER; note = 2'-O-(2-methoxyethyl) ribonucleotide
  modified_base 1: mod_base = OTHER; note = 5-methyl cytidine
  modified_base 11: mod_base = OTHER; note = 5-methyl cytidine
  modified_base 19: mod_base = OTHER; note = 5-methyl cytidine
catttagagacaaagaatcg

SEQ ID NO: 325 - RNA, 20 nt, synthetic construct
  source 1..20: mol_type = other RNA
  modified_base 1..20: mod_base = OTHER; note = Phosphorothioate linkage
  modified_base 1..2: mod_base = OTHER; note = 2'-O-(2-methoxyethyl) ribonucleotide
  modified_base 3: mod_base = OTHER; note = Locked nucleic acid
  modified_base 4..5: mod_base = OTHER; note = 2'-O-(2-methoxyethyl) ribonucleotide
  modified_base 6: mod_base = OTHER; note = Locked nucleic acid
  modified_base 7..8: mod_base = OTHER; note = 2'-O-(2-methoxyethyl) ribonucleotide
  modified_base 9: mod_base = OTHER; note = Locked nucleic acid
  modified_base 10..11: mod_base = OTHER; note = 2'-O-(2-methoxyethyl) ribonucleotide
  modified_base 12: mod_base = OTHER; note = Locked nucleic acid
  modified_base 13..14: mod_base = OTHER; note = 2'-O-(2-methoxyethyl) ribonucleotide
  modified_base 15: mod_base = OTHER; note = Locked nucleic acid
  modified_base 16..17: mod_base = OTHER; note = 2'-O-(2-methoxyethyl) ribonucleotide
  modified_base 18: mod_base = OTHER; note = Locked nucleic acid
  modified_base 19..20: mod_base = OTHER; note = 2'-O-(2-methoxyethyl) ribonucleotide
  modified_base 1: mod_base = OTHER; note = 5-methyl cytidine
  modified_base 11: mod_base = OTHER; note = 5-methyl cytidine
  modified_base 19: mod_base = OTHER; note = 5-methyl cytidine
catttagagacaaagaatcg

SEQ ID NO: 326 - RNA, 20 nt, synthetic construct
  source 1..20: mol_type = other RNA
  modified_base 1..20: mod_base = OTHER; note = Phosphorothioate linkage
  modified_base 1..4: mod_base = OTHER; note = 2'-O-(2-methoxyethyl) ribonucleotide
  modified_base 5: mod_base = OTHER; note = Locked nucleic acid
  modified_base 6..8: mod_base = OTHER; note = 2'-O-(2-methoxyethyl) ribonucleotide
  modified_base 9: mod_base = OTHER; note = Locked nucleic acid
  modified_base 10..12: mod_base = OTHER; note = 2'-O-(2-methoxyethyl) ribonucleotide
  modified_base 13: mod_base = OTHER; note = Locked nucleic acid
  modified_base 14..16: mod_base = OTHER; note = 2'-O-(2-methoxyethyl) ribonucleotide
  modified_base 17: mod_base = OTHER; note = Locked nucleic acid
  modified_base 18..20: mod_base = OTHER; note = 2'-O-(2-methoxyethyl) ribonucleotide
  modified_base 1: mod_base = OTHER; note = 5-methyl cytidine
  modified_base 11: mod_base = OTHER; note = 5-methyl cytidine
  modified_base 19: mod_base = OTHER; note = 5-methyl cytidine
catttagagacaaagaatcg

SEQ ID NO: 327 - RNA, 20 nt, synthetic construct
  source 1..20: mol_type = other RNA
  modified_base 1..20: mod_base = OTHER; note = Phosphorothioate linkage
  modified_base 1..3: mod_base = OTHER; note = 2'-O-(2-methoxyethyl) ribonucleotide
  modified_base 4: mod_base = OTHER; note = Locked nucleic acid
  modified_base 5..7: mod_base = OTHER; note = 2'-O-(2-methoxyethyl) ribonucleotide
  modified_base 8: mod_base = OTHER; note = Locked nucleic acid
  modified_base 9..11: mod_base = OTHER; note = 2'-O-(2-methoxyethyl) ribonucleotide
  modified_base 12: mod_base = OTHER; note = Locked nucleic acid
  modified_base 13..15: mod_base = OTHER; note = 2'-O-(2-methoxyethyl) ribonucleotide
  modified_base 16: mod_base = OTHER; note = Locked nucleic acid
  modified_base 17..20: mod_base = OTHER; note = 2'-O-(2-methoxyethyl) ribonucleotide
  modified_base 1: mod_base = OTHER; note = 5-methyl cytidine
  modified_base 11: mod_base = OTHER; note = 5-methyl cytidine
  modified_base 19: mod_base = OTHER; note = 5-methyl cytidine
catttagagacaaagaatcg

SEQ ID NO: 328 - RNA, 20 nt, synthetic construct
  source 1..20: mol_type = other RNA
  modified_base 1..20: mod_base = OTHER; note = Phosphorothioate linkage
  modified_base 1..5: mod_base = OTHER; note = 2'-O-(2-methoxyethyl) ribonucleotide
  modified_base 6: mod_base = OTHER; note = Locked nucleic acid
  modified_base 7..10: mod_base = OTHER; note = 2'-O-(2-methoxyethyl) ribonucleotide
  modified_base 11: mod_base = OTHER; note = Locked nucleic acid
  modified_base 12..15: mod_base = OTHER; note = 2'-O-(2-methoxyethyl) ribonucleotide
  modified_base 16: mod_base = OTHER; note = Locked nucleic acid
  modified_base 17..20: mod_base = OTHER; note = 2'-O-(2-methoxyethyl) ribonucleotide
  modified_base 1: mod_base = OTHER; note = 5-methyl cytidine
  modified_base 11: mod_base = OTHER; note = 5-methyl cytidine
  modified_base 19: mod_base = OTHER; note = 5-methyl cytidine
catttagagacaaagaatcg

SEQ ID NO: 329 - RNA, 20 nt, synthetic construct
  source 1..20: mol_type = other RNA
  modified_base 1..20: mod_base = OTHER; note = Phosphorothioate linkage
  modified_base 1..4: mod_base = OTHER; note = 2'-O-(2-methoxyethyl) ribonucleotide
  modified_base 5: mod_base = OTHER; note = Locked nucleic acid
  modified_base 6..9: mod_base = OTHER; note = 2'-O-(2-methoxyethyl) ribonucleotide
  modified_base 10: mod_base = OTHER; note = Locked nucleic acid
  modified_base 11..14: mod_base = OTHER; note = 2'-O-(2-methoxyethyl) ribonucleotide
  modified_base 15: mod_base = OTHER; note = Locked nucleic acid
  modified_base 16..20: mod_base = OTHER; note = 2'-O-(2-methoxyethyl) ribonucleotide
  modified_base 1: mod_base = OTHER; note = 5-methyl cytidine
  modified_base 11: mod_base = OTHER; note = 5-methyl cytidine
  modified_base 19: mod_base = OTHER; note = 5-methyl cytidine
catttagagacaaagaatcg

SEQ ID NO: 330 - DNA, 20 bp, synthetic construct
  source 1..20: mol_type = other DNA
  modified_base 1..20: mod_base = OTHER; note = Phosphorothioate linkage
  modified_base 1..5: mod_base = OTHER; note = 2'-O-(2-methoxyethyl) ribonucleotide
  modified_base 6: mod_base = OTHER; note = Locked nucleic acid
  misc_feature 1..6: note = RNA
  misc_feature 7..8: note = DNA
  misc_feature 9: note = RNA
  modified_base 9: mod_base = OTHER; note = Locked amino acid
  misc_feature 10..11: note = DNA
  misc_feature 12: note = RNA
  modified_base 12: mod_base = OTHER; note = Locked amino acid
  misc_feature 13..14: note = DNA
  misc_feature 15..20: note = RNA
  modified_base 15: mod_base = OTHER; note = Locked amino acid
  modified_base 16..20: mod_base = OTHER; note = 2'-O-(2-methoxyethyl) ribonucleotide
  modified_base 8: mod_base = OTHER; note = 5-methyl cytidine
  modified_base 14: mod_base = OTHER; note = 5-methyl cytidine
tgttttgcttggtcaagagg

SEQ ID NO: 331 - DNA, 20 bp, synthetic construct
  source 1..20: mol_type = other DNA
  modified_base 1..20: mod_base = OTHER; note = Phosphorothioate linkage
  modified_base 1..3: mod_base = OTHER; note = 2'-O-(2-methoxyethyl) ribonucleotide
  modified_base 4: mod_base = OTHER; note = Locked nucleic acid
  modified_base 5: mod_base = OTHER; note = 2'-O-(2-methoxyethyl) ribonucleotide
  misc_feature 1..5: note = RNA
  misc_feature 6..7: note = DNA
  misc_feature 8: note = RNA
  modified_base 8: mod_base = OTHER; note = Locked amino acid
  misc_feature 9..11: note = DNA
  misc_feature 12: note = RNA
  modified_base 12: mod_base = OTHER; note = Locked amino acid
  misc_feature 13..15: note = DNA
  misc_feature 16..20: note = RNA
  modified_base 16: mod_base = OTHER; note = Locked amino acid
  modified_base 17..20: mod_base = OTHER; note = 2'-O-(2-methoxyethyl) ribonucleotide
  modified_base 8: mod_base = OTHER; note = 5-methyl cytidine
  modified_base 14: mod_base = OTHER; note = 5-methyl cytidine
tgttttgcttggtcaagagg

SEQ ID NO: 332 - DNA, 20 bp, synthetic construct
  source 1..20: mol_type = other DNA
  modified_base 1..20: mod_base = OTHER; note = Phosphorothioate linkage
  modified_base 1..4: mod_base = OTHER; note = 2'-O-(2-methoxyethyl) ribonucleotide
  modified_base 5: mod_base = OTHER; note = Locked nucleic acid
  misc_feature 1..5: note = RNA
  modified_base 5: mod_base = OTHER; note = Locked amino acid
  misc_feature 6..8: note = DNA
  misc_feature 9: note = RNA
  modified_base 9: mod_base = OTHER; note = Locked amino acid
  misc_feature 10..12: note = DNA
  misc_feature 13: note = RNA
  modified_base 13: mod_base = OTHER; note = Locked amino acid
  misc_feature 14..15: note = DNA
  misc_feature 16..20: note = RNA
  modified_base 16: mod_base = OTHER; note = 2'-O-(2-methoxyethyl) ribonucleotide
  modified_base 17: mod_base = OTHER; note = Locked amino acid
  modified_base 18..20: mod_base = OTHER; note = 2'-O-(2-methoxyethyl) ribonucleotide
  modified_base 8: mod_base = OTHER; note = 5-methyl cytidine
  modified_base 14: mod_base = OTHER; note = 5-methyl cytidine
tgttttgcttggtcaagagg

SEQ ID NO: 333 - RNA, 20 nt, synthetic construct
  source 1..20: mol_type = other RNA
  modified_base 1..20: mod_base = OTHER; note = Phosphorothioate linkage
  modified_base 1..3: mod_base = OTHER; note = 2'-O-(2-methoxyethyl) ribonucleotide
  modified_base 4: mod_base = OTHER; note = Locked nucleic acid
  modified_base 5: mod_base = OTHER; note = 2'-O-(2-methoxyethyl) ribonucleotide
  modified_base 6: mod_base = OTHER; note = Locked nucleic acid
  modified_base 7: mod_base = OTHER; note = 2'-O-(2-methoxyethyl) ribonucleotide
  modified_base 8: mod_base = OTHER; note = Locked nucleic acid
  modified_base 9: mod_base = OTHER; note = 2'-O-(2-methoxyethyl) ribonucleotide
  modified_base 10: mod_base = OTHER; note = Locked nucleic acid
  modified_base 11: mod_base = OTHER; note = 2'-O-(2-methoxyethyl) ribonucleotide
  modified_base 12: mod_base = OTHER; note = Locked nucleic acid
  modified_base 13: mod_base = OTHER; note = 2'-O-(2-methoxyethyl) ribonucleotide
  modified_base 14: mod_base = OTHER; note = Locked nucleic acid
  modified_base 15: mod_base = OTHER; note = 2'-O-(2-methoxyethyl) ribonucleotide
  modified_base 16: mod_base = OTHER; note = Locked nucleic acid
  modified_base 17: mod_base = OTHER; note = 2'-O-(2-methoxyethyl) ribonucleotide
  modified_base 18: mod_base = OTHER; note = Locked nucleic acid
  modified_base 19..20: mod_base = OTHER; note = 2'-O-(2-methoxyethyl) ribonucleotide
  modified_base 8: mod_base = OTHER; note = 5-methyl cytidine
  modified_base 14: mod_base = OTHER; note = 5-methyl cytidine
tgttttgcttggtcaagagg

SEQ ID NO: 334 - RNA, 20 nt, synthetic construct
  source 1..20: mol_type = other RNA
  modified_base 1..20: mod_base = OTHER; note = Phosphorothioate linkage
  modified_base 1..2: mod_base = OTHER; note = 2'-O-(2-methoxyethyl) ribonucleotide
  modified_base 3: mod_base = OTHER; note = Locked nucleic acid
  modified_base 4: mod_base = OTHER; note = 2'-O-(2-methoxyethyl) ribonucleotide
  modified_base 5: mod_base = OTHER; note = Locked nucleic acid
  modified_base 6: mod_base = OTHER; note = 2'-O-(2-methoxyethyl) ribonucleotide
  modified_base 7: mod_base = OTHER; note = Locked nucleic acid
  modified_base 8: mod_base = OTHER; note = 2'-O-(2-methoxyethyl) ribonucleotide
  modified_base 9: mod_base = OTHER; note = Locked nucleic acid
  modified_base 10: mod_base = OTHER; note = 2'-O-(2-methoxyethyl) ribonucleotide
  modified_base 11: mod_base = OTHER; note = Locked nucleic acid
  modified_base 12: mod_base = OTHER; note = 2'-O-(2-methoxyethyl) ribonucleotide
  modified_base 13: mod_base = OTHER; note = Locked nucleic acid
  modified_base 14: mod_base = OTHER; note = 2'-O-(2-methoxyethyl) ribonucleotide
  modified_base 15: mod_base = OTHER; note = Locked nucleic acid
  modified_base 16: mod_base = OTHER; note = 2'-O-(2-methoxyethyl) ribonucleotide
  modified_base 17: mod_base = OTHER; note = Locked nucleic acid
  modified_base 18..20: mod_base = OTHER; note = 2'-O-(2-methoxyethyl) ribonucleotide
  modified_base 8: mod_base = OTHER; note = 5-methyl cytidine
  modified_base 14: mod_base = OTHER; note = 5-methyl cytidine
tgttttgcttggtcaagagg

SEQ ID NO: 335 - RNA, 20 nt, synthetic construct
  source 1..20: mol_type = other RNA
  modified_base 1..20: mod_base = OTHER; note = Phosphorothioate linkage
  modified_base 1..2: mod_base = OTHER; note = 2'-O-(2-methoxyethyl) ribonucleotide
  modified_base 3: mod_base = OTHER; note = Locked nucleic acid
  modified_base 4..5: mod_base = OTHER; note = 2'-O-(2-methoxyethyl) ribonucleotide
  modified_base 6: mod_base = OTHER; note = Locked nucleic acid
  modified_base 7..8: mod_base = OTHER; note = 2'-O-(2-methoxyethyl) ribonucleotide
  modified_base 9: mod_base = OTHER; note = Locked nucleic acid
  modified_base 10..11: mod_base = OTHER; note = 2'-O-(2-methoxyethyl) ribonucleotide
  modified_base 12: mod_base = OTHER; note = Locked nucleic acid
  modified_base 13..14: mod_base = OTHER; note = 2'-O-(2-methoxyethyl) ribonucleotide
  modified_base 15: mod_base = OTHER; note = Locked nucleic acid
  modified_base 16..17: mod_base = OTHER; note = 2'-O-(2-methoxyethyl) ribonucleotide
  modified_base 18: mod_base = OTHER; note = Locked nucleic acid
  modified_base 19..20: mod_base = OTHER; note = 2'-O-(2-methoxyethyl) ribonucleotide
  modified_base 8: mod_base = OTHER; note = 5-methyl cytidine
  modified_base 14: mod_base = OTHER; note = 5-methyl cytidine
tgttttgcttggtcaagagg

SEQ ID NO: 336 - RNA, 20 nt, synthetic construct
  source 1..20: mol_type = other RNA
  modified_base 1..20: mod_base = OTHER; note = Phosphorothioate linkage
  modified_base 1..4: mod_base = OTHER; note = 2'-O-(2-methoxyethyl) ribonucleotide
  modified_base 5: mod_base = OTHER; note = Locked nucleic acid
  modified_base 6..8: mod_base = OTHER; note = 2'-O-(2-methoxyethyl) ribonucleotide
  modified_base 9: mod_base = OTHER; note = Locked nucleic acid
  modified_base 10..12: mod_base = OTHER; note = 2'-O-(2-methoxyethyl) ribonucleotide
  modified_base 13: mod_base = OTHER; note = Locked nucleic acid
  modified_base 14..16: mod_base = OTHER; note = 2'-O-(2-methoxyethyl) ribonucleotide
  modified_base 17: mod_base = OTHER; note = Locked nucleic acid
  modified_base 18..20: mod_base = OTHER; note = 2'-O-(2-methoxyethyl) ribonucleotide
  modified_base 8: mod_base = OTHER; note = 5-methyl cytidine
  modified_base 14: mod_base = OTHER; note = 5-methyl cytidine
tgttttgcttggtcaagagg

SEQ ID NO: 337 - RNA, 20 nt, synthetic construct
  source 1..20: mol_type = other RNA
  modified_base 1..20: mod_base = OTHER; note = Phosphorothioate linkage
  modified_base 1..3: mod_base = OTHER; note = 2'-O-(2-methoxyethyl) ribonucleotide
  modified_base 4: mod_base = OTHER; note = Locked nucleic acid
  modified_base 5..7: mod_base = OTHER; note = 2'-O-(2-methoxyethyl) ribonucleotide
  modified_base 8: mod_base = OTHER; note = Locked nucleic acid
  modified_base 9..11: mod_base = OTHER; note = 2'-O-(2-methoxyethyl) ribonucleotide
  modified_base 12: mod_base = OTHER; note = Locked nucleic acid
  modified_base 13..15: mod_base = OTHER; note = 2'-O-(2-methoxyethyl) ribonucleotide
  modified_base 16: mod_base = OTHER; note = Locked nucleic acid
  modified_base 17..20: mod_base = OTHER; note = 2'-O-(2-methoxyethyl) ribonucleotide
  modified_base 8: mod_base = OTHER; note = 5-methyl cytidine
  modified_base 14: mod_base = OTHER; note = 5-methyl cytidine
tgttttgcttggtcaagagg

SEQ ID NO: 338 - RNA, 20 nt, synthetic construct
  source 1..20: mol_type = other RNA
  modified_base 1..20: mod_base = OTHER; note = Phosphorothioate linkage
  modified_base 1..5: mod_base = OTHER; note = 2'-O-(2-methoxyethyl) ribonucleotide
  modified_base 6: mod_base = OTHER; note = Locked nucleic acid
  modified_base 7..10: mod_base = OTHER; note = 2'-O-(2-methoxyethyl) ribonucleotide
  modified_base 11: mod_base = OTHER; note = Locked nucleic acid
  modified_base 12..15: mod_base = OTHER; note = 2'-O-(2-methoxyethyl) ribonucleotide
  modified_base 16: mod_base = OTHER; note = Locked nucleic acid
  modified_base 17..20: mod_base = OTHER; note = 2'-O-(2-methoxyethyl) ribonucleotide
  modified_base 6: mod_base = OTHER; note = 5-methyl cytidine
  modified_base 11: mod_base = OTHER; note = 5-methyl cytidine
  modified_base 16: mod_base = OTHER; note = 5-methyl cytidine
tgttttgcttggtcaagagg

SEQ ID NO: 339 - RNA, 20 nt, synthetic construct
  source 1..20: mol_type = other RNA
  modified_base 1..20: mod_base = OTHER; note = Phosphorothioate linkage
  modified_base 1..4: mod_base = OTHER; note = 2'-O-(2-methoxyethyl) ribonucleotide
  modified_base 5: mod_base = OTHER; note = Locked nucleic acid
  modified_base 6..9: mod_base = OTHER; note = 2'-O-(2-methoxyethyl) ribonucleotide
  modified_base 10: mod_base = OTHER; note = Locked nucleic acid
  modified_base 11..14: mod_base = OTHER; note = 2'-O-(2-methoxyethyl) ribonucleotide
  modified_base 15: mod_base = OTHER; note = Locked nucleic acid
  modified_base 16..20: mod_base = OTHER; note = 2'-O-(2-methoxyethyl) ribonucleotide
  modified_base 10: mod_base = OTHER; note = Locked nucleic acid
  modified_base 8: mod_base = OTHER; note = 5-methyl cytidine
  modified_base 14: mod_base = OTHER; note = 5-methyl cytidine
tgttttgcttggtcaagagg

SEQ ID NO: 340 - DNA, 20 bp, synthetic construct
  source 1..20: mol_type = other DNA
  modified_base 1..20: mod_base = OTHER; note = Phosphorothioate linkage
  modified_base 1..5: mod_base = OTHER; note = 2'-O-(2-methoxyethyl) ribonucleotide
  modified_base 6: mod_base = OTHER; note = Locked nucleic acid
  misc_feature 1..6: note = RNA
  misc_feature 7..8: note = DNA
  misc_feature 9: note = RNA
  modified_base 9: mod_base = OTHER; note = Locked nucleic acid
  misc_feature 10..11: note = DNA
  misc_feature 12: note = RNA
  modified_base 12: mod_base = OTHER; note = Locked nucleic acid
  misc_feature 13..14: note = DNA
  misc_feature 15..20: note = RNA
  modified_base 15: mod_base = OTHER; note = Locked nucleic acid
  modified_base 16..20: mod_base = OTHER; note = 2'-O-(2-methoxyethyl) ribonucleotide
  modified_base 2..7: mod_base = OTHER; note = 5-methyl cytidine
  modified_base 9: mod_base = OTHER; note = 5-methyl cytidine
  modified_base 11..12: mod_base = OTHER; note = 5-methyl cytidine
  modified_base 19..20: mod_base = OTHER; note = 5-methyl cytidine
acccccctcaccttggttcc

SEQ ID NO: 341 - DNA, 20 bp, synthetic construct
  source 1..20: mol_type = other DNA
  modified_base 1..20: mod_base = OTHER; note = Phosphorothioate linkage
  modified_base 1..3: mod_base = OTHER; note = 2'-O-(2-methoxyethyl) ribonucleotide
  modified_base 4: mod_base = OTHER; note = Locked nucleic acid
  modified_base 5: mod_base = OTHER; note = 2'-O-(2-methoxyethyl) ribonucleotide
  misc_feature 1..5: note = RNA
  misc_feature 6..7: note = DNA
  misc_feature 8: note = RNA
  modified_base 8: mod_base = OTHER; note = Locked nucleic acid
  misc_feature 9..11: note = DNA
  misc_feature 12: note = RNA
  modified_base 12: mod_base = OTHER; note = Locked nucleic acid
  misc_feature 13..15: note = DNA
  misc_feature 16..20: note = RNA
  modified_base 16: mod_base = OTHER; note = Locked nucleic acid
  modified_base 16..20: mod_base = OTHER; note = 2'-O-(2-methoxyethyl) ribonucleotide
  modified_base 2..7: mod_base = OTHER; note = 5-methyl cytidine
  modified_base 9: mod_base = OTHER; note = 5-methyl cytidine
  modified_base 11..12: mod_base = OTHER; note = 5-methyl cytidine
  modified_base 19..20: mod_base = OTHER; note = 5-methyl cytidine
acccccctcaccttggttcc

SEQ ID NO: 342 - DNA, 20 bp, synthetic construct
  source 1..20: mol_type = other DNA
  modified_base 1..20: mod_base = OTHER; note = Phosphorothioate linkage
  modified_base 1..4: mod_base = OTHER; note = 2'-O-(2-methoxyethyl) ribonucleotide
  modified_base 5: mod_base = OTHER; note = Locked nucleic acid
  misc_feature 1..5: note = RNA
  misc_feature 6..8: note = DNA
  misc_feature 9: note = RNA
  modified_base 9: mod_base = OTHER; note = Locked nucleic acid
  misc_feature 10..12: note = DNA
  misc_feature 13: note = RNA
  modified_base 13: mod_base = OTHER; note = Locked nucleic acid
  misc_feature 14..15: note = DNA
  misc_feature 16..20: note = RNA
  modified_base 17: mod_base = OTHER; note = Locked nucleic acid
  modified_base 16..20: mod_base = OTHER; note = 2'-O-(2-methoxyethyl) ribonucleotide
  modified_base 2..7: mod_base = OTHER; note = 5-methyl cytidine
  modified_base 9: mod_base = OTHER; note = 5-methyl cytidine
  modified_base 11..12: mod_base = OTHER; note = 5-methyl cytidine
  modified_base 19..20: mod_base = OTHER; note = 5-methyl cytidine
acccccctcaccttggttcc

SEQ ID NO: 343 - RNA, 20 nt, synthetic construct
  source 1..20: mol_type = other RNA
  modified_base 1..20: mod_base = OTHER; note = Phosphorothioate linkage
  modified_base 1..3: mod_base = OTHER; note = 2'-O-(2-methoxyethyl) ribonucleotide
  modified_base 4: mod_base = OTHER; note = Locked nucleic acid
  modified_base 5: mod_base = OTHER; note = 2'-O-(2-methoxyethyl) ribonucleotide
  modified_base 6: mod_base = OTHER; note = Locked nucleic acid
  modified_base 7: mod_base = OTHER; note = 2'-O-(2-methoxyethyl) ribonucleotide
  modified_base 8: mod_base = OTHER; note = Locked nucleic acid
  modified_base 9: mod_base = OTHER; note = 2'-O-(2-methoxyethyl) ribonucleotide
  modified_base 10: mod_base = OTHER; note = Locked nucleic acid
  modified_base 11: mod_base = OTHER; note = 2'-O-(2-methoxyethyl) ribonucleotide
  modified_base 12: mod_base = OTHER; note = Locked nucleic acid
  modified_base 13: mod_base = OTHER; note = 2'-O-(2-methoxyethyl) ribonucleotide
  modified_base 14: mod_base = OTHER; note = Locked nucleic acid
  modified_base 15: mod_base = OTHER; note = 2'-O-(2-methoxyethyl) ribonucleotide
  modified_base 16: mod_base = OTHER; note = Locked nucleic acid
  modified_base 17: mod_base = OTHER; note = 2'-O-(2-methoxyethyl) ribonucleotide
  modified_base 18: mod_base = OTHER; note = Locked nucleic acid
  modified_base 19..20: mod_base = OTHER; note = 2'-O-(2-methoxyethyl) ribonucleotide
  modified_base 2..7: mod_base = OTHER; note = 5-methyl cytidine
  modified_base 9: mod_base = OTHER; note = 5-methyl cytidine
  modified_base 11..12: mod_base = OTHER; note = 5-methyl cytidine
  modified_base 19..20: mod_base = OTHER; note = 5-methyl cytidine
acccccctcaccttggttcc

SEQ ID NO: 344 - RNA, 20 nt, synthetic construct
  source 1..20: mol_type = other RNA
  modified_base 1..20: mod_base = OTHER; note = Phosphorothioate linkage
  modified_base 1..2: mod_base = OTHER; note = 2'-O-(2-methoxyethyl) ribonucleotide
  modified_base 3: mod_base = OTHER; note = Locked nucleic acid
  modified_base 4: mod_base = OTHER; note = 2'-O-(2-methoxyethyl) ribonucleotide
  modified_base 5: mod_base = OTHER; note = Locked nucleic acid
  modified_base 6: mod_base = OTHER; note = 2'-O-(2-methoxyethyl) ribonucleotide
  modified_base 7: mod_base = OTHER; note = Locked nucleic acid
  modified_base 8: mod_base = OTHER; note = 2'-O-(2-methoxyethyl) ribonucleotide
  modified_base 9: mod_base = OTHER; note = Locked nucleic acid
  modified_base 10: mod_base = OTHER; note = 2'-O-(2-methoxyethyl) ribonucleotide
  modified_base 11: mod_base = OTHER; note = Locked nucleic acid
  modified_base 12: mod_base = OTHER; note = 2'-O-(2-methoxyethyl) ribonucleotide
  modified_base 13: mod_base = OTHER; note = Locked nucleic acid
  modified_base 14: mod_base = OTHER; note = 2'-O-(2-methoxyethyl) ribonucleotide
  modified_base 15: mod_base = OTHER; note = Locked nucleic acid
  modified_base 16: mod_base = OTHER; note = 2'-O-(2-methoxyethyl) ribonucleotide
  modified_base 17: mod_base = OTHER; note = Locked nucleic acid
  modified_base 18..20: mod_base = OTHER; note = 2'-O-(2-methoxyethyl) ribonucleotide
  modified_base 2..7: mod_base = OTHER; note = 5-methyl cytidine
  modified_base 9: mod_base = OTHER; note = 5-methyl cytidine
  modified_base 11..12: mod_base = OTHER; note = 5-methyl cytidine
  modified_base 19..20: mod_base = OTHER; note = 5-methyl cytidine
acccccctcaccttggttcc

SEQ ID NO: 345 - RNA, 20 nt, synthetic construct
  source 1..20: mol_type = other RNA
  modified_base 1..20: mod_base = OTHER; note = Phosphorothioate linkage
  modified_base 1..2: mod_base = OTHER; note = 2'-O-(2-methoxyethyl) ribonucleotide
  modified_base 3: mod_base = OTHER; note = Locked nucleic acid
  modified_base 4..5: mod_base = OTHER; note = 2'-O-(2-methoxyethyl) ribonucleotide
  modified_base 6: mod_base = OTHER; note = Locked nucleic acid
  modified_base 7..8: mod_base = OTHER; note = 2'-O-(2-methoxyethyl) ribonucleotide
  modified_base 9: mod_base = OTHER; note = Locked nucleic acid
  modified_base 10..11: mod_base = OTHER; note = 2'-O-(2-methoxyethyl) ribonucleotide
  modified_base 12: mod_base = OTHER; note = Locked nucleic acid
  modified_base 13..14: mod_base = OTHER; note = 2'-O-(2-methoxyethyl) ribonucleotide
  modified_base 15: mod_base = OTHER; note = Locked nucleic acid
  modified_base 16..17: mod_base = OTHER; note = 2'-O-(2-methoxyethyl) ribonucleotide
  modified_base 18: mod_base = OTHER; note = Locked nucleic acid
  modified_base 19..20: mod_base = OTHER; note = 2'-O-(2-methoxyethyl) ribonucleotide
  modified_base 2..7: mod_base = OTHER; note = 5-methyl cytidine
  modified_base 9: mod_base = OTHER; note = 5-methyl cytidine
  modified_base 11..12: mod_base = OTHER; note = 5-methyl cytidine
  modified_base 19..20: mod_base = OTHER; note = 5-methyl cytidine
acccccctcaccttggttcc

SEQ ID NO: 346 - RNA, 20 nt, synthetic construct
  source 1..20: mol_type = other RNA
  modified_base 1..20: mod_base = OTHER; note = Phosphorothioate linkage
  modified_base 1..4: mod_base = OTHER; note = 2'-O-(2-methoxyethyl) ribonucleotide
  modified_base 5: mod_base = OTHER; note = Locked nucleic acid
  modified_base 6..8: mod_base = OTHER; note = 2'-O-(2-methoxyethyl) ribonucleotide
  modified_base 9: mod_base = OTHER; note = Locked nucleic acid
  modified_base 10..12: mod_base = OTHER; note = 2'-O-(2-methoxyethyl) ribonucleotide
  modified_base 13: mod_base = OTHER; note = Locked nucleic acid
  modified_base 14..16: mod_base = OTHER; note = 2'-O-(2-methoxyethyl) ribonucleotide
  modified_base 17: mod_base = OTHER; note = Locked nucleic acid
  modified_base 18..20: mod_base = OTHER; note = 2'-O-(2-methoxyethyl) ribonucleotide
  modified_base 2..7: mod_base = OTHER; note = 5-methyl cytidine
  modified_base 9: mod_base = OTHER; note = 5-methyl cytidine
  modified_base 11..12: mod_base = OTHER; note = 5-methyl cytidine
  modified_base 19..20: mod_base = OTHER; note = 5-methyl cytidine
acccccctcaccttggttcc

SEQ ID NO: 347 - RNA, 20 nt, synthetic construct
  source 1..20: mol_type = other RNA
  modified_base 1..20: mod_base = OTHER; note = Phosphorothioate linkage
  modified_base 1..3: mod_base = OTHER; note = 2'-O-(2-methoxyethyl) ribonucleotide
  modified_base 4: mod_base = OTHER; note = Locked nucleic acid
  modified_base 5..7: mod_base = OTHER; note = 2'-O-(2-methoxyethyl) ribonucleotide
  modified_base 8: mod_base = OTHER; note = Locked nucleic acid
  modified_base 9..11: mod_base = OTHER; note = 2'-O-(2-methoxyethyl) ribonucleotide
  modified_base 12: mod_base = OTHER; note = Locked nucleic acid
  modified_base 13..15: mod_base = OTHER; note = 2'-O-(2-methoxyethyl) ribonucleotide
  modified_base 16: mod_base = OTHER; note = Locked nucleic acid
  modified_base 17..20: mod_base = OTHER; note = 2'-O-(2-methoxyethyl) ribonucleotide
  modified_base 2..7: mod_base = OTHER; note = 5-methyl cytidine
  modified_base 9: mod_base = OTHER; note = 5-methyl cytidine
  modified_base 11..12: mod_base = OTHER; note = 5-methyl cytidine
  modified_base 19..20: mod_base = OTHER; note = 5-methyl cytidine
acccccctcaccttggttcc

SEQ ID NO: 348 - RNA, 20 nt, synthetic construct
  source 1..20: mol_type = other RNA
  modified_base 1..20: mod_base = OTHER; note = Phosphorothioate linkage
  modified_base 1..5: mod_base = OTHER; note = 2'-O-(2-methoxyethyl) ribonucleotide
  modified_base 6: mod_base = OTHER; note = Locked nucleic acid
  modified_base 7..10: mod_base = OTHER; note = 2'-O-(2-methoxyethyl) ribonucleotide
  modified_base 11: mod_base = OTHER; note = Locked nucleic acid
  modified_base 12..15: mod_base = OTHER; note = 2'-O-(2-methoxyethyl) ribonucleotide
  modified_base 16: mod_base = OTHER; note = Locked nucleic acid
  modified_base 17..20: mod_base = OTHER; note = 2'-O-(2-methoxyethyl) ribonucleotide
  modified_base 2..7: mod_base = OTHER; note = 5-methyl cytidine
  modified_base 9: mod_base = OTHER; note = 5-methyl cytidine
  modified_base 11..12: mod_base = OTHER; note = 5-methyl cytidine
  modified_base 19..20: mod_base = OTHER; note = 5-methyl cytidine
acccccctcaccttggttcc

SEQ ID NO: 349 - RNA, 20 nt, synthetic construct
  source 1..20: mol_type = other RNA
  modified_base 1..20: mod_base = OTHER; note = Phosphorothioate linkage
  modified_base 1..4: mod_base = OTHER; note = 2'-O-(2-methoxyethyl) ribonucleotide
  modified_base 5: mod_base = OTHER; note = Locked nucleic acid
  modified_base 6..9: mod_base = OTHER; note = 2'-O-(2-methoxyethyl) ribonucleotide
  modified_base 10: mod_base = OTHER; note = Locked nucleic acid
  modified_base 11..14: mod_base = OTHER; note = 2'-O-(2-methoxyethyl) ribonucleotide
  modified_base 15: mod_base = OTHER; note = Locked nucleic acid
  modified_base 16..20: mod_base = OTHER; note = 2'-O-(2-methoxyethyl) ribonucleotide
  modified_base 2..7: mod_base = OTHER; note = 5-methyl cytidine
  modified_base 9: mod_base = OTHER; note = 5-methyl cytidine
  modified_base 11..12: mod_base = OTHER; note = 5-methyl cytidine
  modified_base 19..20: mod_base = OTHER; note = 5-methyl cytidine
acccccctcaccttggttcc

SEQ ID NO: 350 - DNA, 22 bp, synthetic construct
  source 1..22: mol_type = other DNA
  modified_base 1..22: mod_base = OTHER; note = Phosphorothioate linkage
  modified_base 1..6: mod_base = OTHER; note = 2'-O-(2-methoxyethyl) ribonucleotide
  misc_feature 1..6: note = RNA
  misc_feature 7..16: note = DNA
  misc_feature 17..22: note = RNA
  modified_base 17..22: mod_base = OTHER; note = 2'-O-(2-methoxyethyl) ribonucleotide
  modified_base 3: mod_base = OTHER; note = 5-methyl cytidine
  modified_base 16..17: mod_base = OTHER; note = 5-methyl cytidine
  modified_base 21: mod_base = OTHER; note = 5-methyl cytidine
atctggaaaataatgcctttct

SEQ ID NO: 351 - RNA, 22 nt, synthetic construct
  source 1..22: mol_type = other RNA
  modified_base 1..22: mod_base = OTHER; note = Phosphorothioate linkage
  modified_base 1..22: mod_base = OTHER; note = 2'-O-(2-methoxyethyl) ribonucleotide
  modified_base 3: mod_base = OTHER; note = 5-methyl cytidine
  modified_base 16..17: mod_base = OTHER; note = 5-methyl cytidine
  modified_base 21: mod_base = OTHER; note = 5-methyl cytidine
atctggaaaataatgcctttct

SEQ ID NO: 352 - DNA, 22 bp, synthetic construct
  source 1..22: mol_type = other DNA
  modified_base 1..22: mod_base = OTHER; note = Phosphorothioate linkage
  modified_base 1..5: mod_base = OTHER; note = 2'-O-(2-methoxyethyl) ribonucleotide
  misc_feature 1..5: note = RNA
  misc_feature 6..8: note = DNA
  misc_feature 9: note = RNA
  modified_base 9: mod_base = OTHER; note = 2'-O-(2-methoxyethyl) ribonucleotide
  misc_feature 10..13: note = DNA
  modified_base 14: mod_base = OTHER; note = 2'-O-(2-methoxyethyl) ribonucleotide
  misc_feature 14: note = RNA
  misc_feature 15..17: note = DNA
  modified_base 18..22: mod_base = OTHER; note = 2'-O-(2-methoxyethyl) ribonucleotide
  modified_base 3: mod_base = OTHER; note = 5-methyl cytidine
  modified_base 16..17: mod_base = OTHER; note = 5-methyl cytidine
  modified_base 21: mod_base = OTHER; note = 5-methyl cytidine
atctggaaaataatgcctttct

SEQ ID NO: 353 - DNA, 22 bp, synthetic construct
  source 1..22: mol_type = other DNA
  modified_base 1..22: mod_base = OTHER; note = Phosphorothioate linkage
  modified_base 1..5: mod_base = OTHER; note = 2'-O-(2-methoxyethyl) ribonucleotide
  modified_base 6: mod_base = OTHER; note = Locked nucleic acid
  misc_feature 1..6: note = RNA
  misc_feature 7..8: note = DNA
  misc_feature 9: note = RNA
  modified_base 9: mod_base = OTHER; note = Locked amino acid
  misc_feature 10..13: note = DNA
  misc_feature 14: note = RNA
  modified_base 14: mod_base = OTHER; note = Locked amino acid
  misc_feature 15..16: note = DNA
  misc_feature 17..22: note = RNA
  modified_base 17: mod_base = OTHER; note = Locked amino acid
  modified_base 18..22: mod_base = OTHER; note = 2'-O-(2-methoxyethyl) ribonucleotide
  modified_base 2: mod_base = OTHER; note = 5-methyl cytidine
  modified_base 16..17: mod_base = OTHER; note = 5-methyl cytidine
  modified_base 21: mod_base = OTHER; note = 5-methyl cytidine
atctggaaaataatgcctttct

SEQ ID NO: 354 - DNA, 24 bp, synthetic construct
  source 1..24: mol_type = other DNA
  modified_base 1..24: mod_base = OTHER; note = Phosphorothioate linkage
  modified_base 1..7: mod_base = OTHER; note = 2'-O-(2-methoxyethyl) ribonucleotide
  misc_feature 1..7: note = RNA
  misc_feature 8..17: note = DNA
  misc_feature 18..24: note = RNA
  modified_base 18..24: mod_base = OTHER; note = 2'-O-(2-methoxyethyl) ribonucleotide
  modified_base 4: mod_base = OTHER; note = 5-methyl cytidine
  modified_base 17..18: mod_base = OTHER; note = 5-methyl cytidine
  modified_base 22: mod_base = OTHER; note = 5-methyl cytidine
tatctggaaaataatgcctttcta

SEQ ID NO: 355 - RNA, 24 nt, synthetic construct
  source 1..24: mol_type = other RNA
  modified_base 1..24: mod_base = OTHER; note = Phosphorothioate linkage
  modified_base 1..24: mod_base = OTHER; note = 2'-O-(2-methoxyethyl) ribonucleotide
  modified_base 4: mod_base = OTHER; note = 5-methyl cytidine
  modified_base 17..18: mod_base = OTHER; note = 5-methyl cytidine
  modified_base 22: mod_base = OTHER; note = 5-methyl cytidine
tatctggaaaataatgcctttcta

SEQ ID NO: 356 - DNA, 24 bp, synthetic construct
  source 1..24: mol_type = other DNA
  modified_base 1..24: mod_base = OTHER; note = Phosphorothioate linkage
  modified_base 1..5: mod_base = OTHER; note = 2'-O-(2-methoxyethyl) ribonucleotide
  misc_feature 1..5: note = RNA
  misc_feature 6..7: note = DNA
  misc_feature 8: note = RNA
  modified_base 8: mod_base = OTHER; note = 2'-O-(2-methoxyethyl) ribonucleotide
  misc_feature 9..10: note = DNA
  misc_feature 11: note = RNA
  modified_base 11: mod_base = OTHER; note = 2'-O-(2-methoxyethyl) ribonucleotide
  misc_feature 12..13: note = DNA
  misc_feature 14: note = RNA
  modified_base 14: mod_base = OTHER; note = 2'-O-(2-methoxyethyl) ribonucleotide
  misc_feature 15..16: note = DNA
  misc_feature 17: note = RNA
  modified_base 17: mod_base = OTHER; note = 2'-O-(2-methoxyethyl) ribonucleotide
  misc_feature 18..19: note = DNA
  misc_feature 20..24: note = RNA
  modified_base 20..24: mod_base = OTHER; note = 2'-O-(2-methoxyethyl) ribonucleotide
  modified_base 4: mod_base = OTHER; note = 5-methyl cytidine
  modified_base 17..18: mod_base = OTHER; note = 5-methyl cytidine
  modified_base 22: mod_base = OTHER; note = 5-methyl cytidine
tatctggaaaataatgcctttcta

SEQ ID NO: 357 - DNA, 24 bp, synthetic construct
  source 1..24: mol_type = other DNA
  modified_base 1..24: mod_base = OTHER; note = Phosphorothioate linkage
  modified_base 1..5: mod_base = OTHER; note = 2'-O-(2-methoxyethyl) ribonucleotide
  misc_feature 1..5: note = RNA
  misc_feature 6..7: note = DNA
  misc_feature 8: note = RNA
  modified_base 8: mod_base = OTHER; note = Locked nucleic acid
  misc_feature 9..10: note = DNA
  misc_feature 11: note = RNA
  modified_base 11: mod_base = OTHER; note = Locked nucleic acid
  misc_feature 12..13: note = DNA
  misc_feature 14: note = RNA
  modified_base 14: mod_base = OTHER; note = Locked nucleic acid
  misc_feature 15..16: note = DNA
  misc_feature 17: note = RNA
  modified_base 17: mod_base = OTHER; note = Locked nucleic acid
  misc_feature 18..19: note = DNA
  misc_feature 20..24: note = RNA
  modified_base 20..24: mod_base = OTHER; note = 2'-O-(2-methoxyethyl) ribonucleotide
  modified_base 4: mod_base = OTHER; note = 5-methyl cytidine
  modified_base 17..18: mod_base = OTHER; note = 5-methyl cytidine
  modified_base 22: mod_base = OTHER; note = 5-methyl cytidine
tatctggaaaataatgcctttcta

SEQ ID NO: 358 - DNA, 22 bp, synthetic construct
  source 1..22: mol_type = other DNA
  modified_base 1..22: mod_base = OTHER; note = Phosphorothioate linkage
  modified_base 1..6: mod_base = OTHER; note = 2'-O-(2-methoxyethyl) ribonucleotide
  misc_feature 1..6: note = RNA
  misc_feature 7..16: note = DNA
  misc_feature 17..22: note = RNA
  modified_base 17..22: mod_base = OTHER; note = 2'-O-(2-methoxyethyl) ribonucleotide
  modified_base 2: mod_base = OTHER; note = 5-methyl cytidine
  modified_base 12: mod_base = OTHER; note = 5-methyl cytidine
  modified_base 20: mod_base = OTHER; note = 5-methyl cytidine
  modified_base 22: mod_base = OTHER; note = 5-methyl cytidine
acatttagagacaaagaatcgc

SEQ ID NO: 359 - RNA, 22 nt, synthetic construct
  source 1..22: mol_type = other RNA
  modified_base 1..22: mod_base = OTHER; note = Phosphorothioate linkage
  modified_base 1..22: mod_base = OTHER; note = 2'-O-(2-methoxyethyl) ribonucleotide
  modified_base 2: mod_base = OTHER; note = 5-methyl cytidine
  modified_base 12: mod_base = OTHER; note = 5-methyl cytidine
  modified_base 20: mod_base = OTHER; note = 5-methyl cytidine
  modified_base 22: mod_base = OTHER; note = 5-methyl cytidine
acatttagagacaaagaatcgc

SEQ ID NO: 360 - DNA, 22 bp, synthetic construct
  source 1..22: mol_type = other DNA
  modified_base 1..22: mod_base = OTHER; note = Phosphorothioate linkage
  modified_base 1..5: mod_base = OTHER; note = 2'-O-(2-methoxyethyl) ribonucleotide
  misc_feature 1..5: note = RNA
  misc_feature 6..8: note = DNA
  misc_feature 9: note = RNA
  modified_base 9: mod_base = OTHER; note = 2'-O-(2-methoxyethyl) ribonucleotide
  misc_feature 10..13: note = DNA
  misc_feature 14: note = RNA
  modified_base 14: mod_base = OTHER; note = 2'-O-(2-methoxyethyl) ribonucleotide
  misc_feature 15..17: note = DNA
  misc_feature 18..22: note = RNA
  modified_base 18..22: mod_base = OTHER; note = 2'-O-(2-methoxyethyl) ribonucleotide
  modified_base 2: mod_base = OTHER; note = 5-methyl cytidine
  modified_base 12: mod_base = OTHER; note = 5-methyl cytidine
  modified_base 20: mod_base = OTHER; note = 5-methyl cytidine
  modified_base 22: mod_base = OTHER; note = 5-methyl cytidine
acatttagagacaaagaatcgc

SEQ ID NO: 361 - DNA, 22 bp, synthetic construct
  source 1..22: mol_type = other DNA
  modified_base 1..22: mod_base = OTHER; note = Phosphorothioate linkage
  modified_base 1..5: mod_base = OTHER; note = 2'-O-(2-methoxyethyl) ribonucleotide
  modified_base 6: mod_base = OTHER; note = Locked nucleic acid
  misc_feature 1..6: note = RNA
  misc_feature 7..8: note = DNA
  misc_feature 9: note = RNA
  modified_base 9: mod_base = OTHER; note = Locked nucleic acid
  misc_feature 10..13: note = DNA
  misc_feature 14: note = RNA
  modified_base 14: mod_base = OTHER; note = Locked nucleic acid
  misc_feature 15..16: note = DNA
  misc_feature 17: note = RNA
  modified_base 17: mod_base = OTHER; note = Locked nucleic acid
  modified_base 18..22: mod_base = OTHER; note = 2'-O-(2-methoxyethyl) ribonucleotide
  modified_base 2: mod_base = OTHER; note = 5-methyl cytidine
  modified_base 12: mod_base = OTHER; note = 5-methyl cytidine
  modified_base 20: mod_base = OTHER; note = 5-methyl cytidine
  modified_base 22: mod_base = OTHER; note = 5-methyl cytidine
acatttagagacaaagaatcgc

SEQ ID NO: 362 - DNA, 24 bp, synthetic construct
  source 1..24: mol_type = other DNA
  modified_base 1..24: mod_base = OTHER; note = Phosphorothioate linkage
  modified_base 1..7: mod_base = OTHER; note = 2'-O-(2-methoxyethyl) ribonucleotide
  misc_feature 1..7: note = RNA
  misc_feature 8..17: note = DNA
  misc_feature 18..24: note = RNA
  modified_base 18..24: mod_base = OTHER; note = 2'-O-(2-methoxyethyl) ribonucleotide
  modified_base 3: mod_base = OTHER; note = 5-methyl cytidine
  modified_base 13: mod_base = OTHER; note = 5-methyl cytidine
  modified_base 21: mod_base = OTHER; note = 5-methyl cytidine
  modified_base 23: mod_base = OTHER; note = 5-methyl cytidine
tacatttagagacaaagaatcgct

SEQ ID NO: 363 - RNA, 24 nt, synthetic construct
  source 1..24: mol_type = other RNA
  modified_base 1..24: mod_base = OTHER; note = Phosphorothioate linkage
  modified_base 1..24: mod_base = OTHER; note = 2'-O-(2-methoxyethyl) ribonucleotide
  modified_base 3: mod_base = OTHER; note = 5-methyl cytidine
  modified_base 13: mod_base = OTHER; note = 5-methyl cytidine
  modified_base 21: mod_base = OTHER; note = 5-methyl cytidine
  modified_base 23: mod_base = OTHER; note = 5-methyl cytidine
tacatttagagacaaagaatcgct

SEQ ID NO: 364 - DNA, 24 bp, synthetic construct
  source 1..24: mol_type = other DNA
  modified_base 1..24: mod_base = OTHER; note = Phosphorothioate linkage
  modified_base 1..5: mod_base = OTHER; note = 2'-O-(2-methoxyethyl) ribonucleotide
  misc_feature 1..5: note = RNA
  misc_feature 6..7: note = DNA
  misc_feature 8: note = RNA
  modified_base 8: mod_base = OTHER; note = 2'-O-(2-methoxyethyl) ribonucleotide
  misc_feature 9..10: note = DNA
  misc_feature 11: note = RNA
  modified_base 11: mod_base = OTHER; note = 2'-O-(2-methoxyethyl) ribonucleotide
  misc_feature 12..13: note = DNA
  misc_feature 14: note = RNA
  modified_base 14: mod_base = OTHER; note = 2'-O-(2-methoxyethyl) ribonucleotide
  misc_feature 15..16: note = DNA
  misc_feature 17: note = RNA
  misc_feature 18..19: note = DNA
  misc_feature 20..24: note = RNA
  modified_base 20..24: mod_base = OTHER; note = 2'-O-(2-methoxyethyl) ribonucleotide
  modified_base 3: mod_base = OTHER; note = 5-methyl cytidine
  modified_base 13: mod_base = OTHER; note = 5-methyl cytidine
  modified_base 21: mod_base = OTHER; note = 5-methyl cytidine
  modified_base 23: mod_base = OTHER; note = 5-methyl cytidine
tacatttagagacaaagaatcgct

SEQ ID NO: 365 - DNA, 24 bp, synthetic construct
  source 1..24: mol_type = other DNA
  modified_base 1..24: mod_base = OTHER; note = Phosphorothioate linkage
  modified_base 1..5: mod_base = OTHER; note = 2'-O-(2-methoxyethyl) ribonucleotide
  misc_feature 1..5: note = RNA
  misc_feature 6..7: note = DNA
  misc_feature 8: note = RNA
  modified_base 8: mod_base = OTHER; note = 2'-O-(2-methoxyethyl) ribonucleotide
  misc_feature 9..10: note = DNA
  misc_feature 11: note = RNA
  modified_base 11: mod_base = OTHER; note = 2'-O-(2-methoxyethyl) ribonucleotide
  misc_feature 12..13: note = DNA
  misc_feature 14: note = RNA
  modified_base 14: mod_base = OTHER; note = 2'-O-(2-methoxyethyl) ribonucleotide
  misc_feature 15..16: note = DNA
  misc_feature 17: note = RNA
  misc_feature 18..19: note = DNA
  misc_feature 20..24: note = RNA
  modified_base 20..24: mod_base = OTHER; note = 2'-O-(2-methoxyethyl) ribonucleotide
  modified_base 3: mod_base = OTHER; note = 5-methyl cytidine
  modified_base 13: mod_base = OTHER; note = 5-methyl cytidine
  modified_base 21: mod_base = OTHER; note = 5-methyl cytidine
  modified_base 23: mod_base = OTHER; note = 5-methyl cytidine
tacatttagagacaaagaatcgct

SEQ ID NO: 366 - DNA, 22 bp, synthetic construct
  source 1..22: mol_type = other DNA
  modified_base 1..22: mod_base = OTHER; note = Phosphorothioate linkage
  modified_base 1..6: mod_base = OTHER; note = 2'-O-(2-methoxyethyl) ribonucleotide
  misc_feature 1..6: note = RNA
  misc_feature 7..16: note = DNA
  misc_feature 17..22: note = RNA
  modified_base 17..22: mod_base = OTHER; note = 2'-O-(2-methoxyethyl) ribonucleotide
  modified_base 9: mod_base = OTHER; note = 5-methyl cytidine
  modified_base 15: mod_base = OTHER; note = 5-methyl cytidine
gtgttttgcttggtcaagagga

SEQ ID NO: 367 - RNA, 22 nt, synthetic construct
  source 1..22: mol_type = other RNA
  modified_base 1..22: mod_base = OTHER; note = Phosphorothioate linkage
  modified_base 1..22: mod_base = OTHER; note = 2'-O-(2-methoxyethyl) ribonucleotide
  modified_base 9: mod_base = OTHER; note = 5-methyl cytidine
  modified_base 15: mod_base = OTHER; note = 5-methyl cytidine
gtgttttgcttggtcaagagga

SEQ ID NO: 368 - DNA, 22 bp, synthetic construct
  source 1..22: mol_type = other DNA
  modified_base 1..22: mod_base = OTHER; note = Phosphorothioate linkage
  modified_base 1..5: mod_base = OTHER; note = 2'-O-(2-methoxyethyl) ribonucleotide
  misc_feature 1..5: note = RNA
  misc_feature 6..8: note = DNA
  misc_feature 9: note = RNA
  modified_base 9: mod_base = OTHER; note = 2'-O-(2-methoxyethyl) ribonucleotide
  misc_feature 10..13: note = DNA
  misc_feature 14: note = RNA
  modified_base 14: mod_base = OTHER; note = 2'-O-(2-methoxyethyl) ribonucleotide
  misc_feature 15..17: note = DNA
  misc_feature 18..22: note = RNA
  modified_base 18..22: mod_base = OTHER; note = 2'-O-(2-methoxyethyl) ribonucleotide
  modified_base 9: mod_base = OTHER; note = 5-methyl cytidine
  modified_base 15: mod_base = OTHER; note = 5-methyl cytidine
gtgttttgcttggtcaagagga

SEQ ID NO: 369 - DNA, 22 bp, synthetic construct
  source 1..22: mol_type = other DNA
  modified_base 1..22: mod_base = OTHER; note = Phosphorothioate linkage
  modified_base 1..5: mod_base = OTHER; note = 2'-O-(2-methoxyethyl) ribonucleotide
  misc_feature 1..6: note = RNA
  modified_base 6: mod_base = OTHER; note = Locked nucleic acid
  misc_feature 7..8: note = DNA
  misc_feature 9: note = RNA
  modified_base 9: mod_base = OTHER; note = Locked nucleic acid
  misc_feature 10..13: note = DNA
  misc_feature 14: note = RNA
  modified_base 14: mod_base = OTHER; note = Locked nucleic acid
  misc_feature 15..16: note = DNA
  misc_feature 17..22: note = RNA
  modified_base 17: mod_base = OTHER; note = Locked nucleic acid
  modified_base 18..22: mod_base = OTHER; note = 2'-O-(2-methoxyethyl) ribonucleotide
  modified_base 9: mod_base = OTHER; note = 5-methyl cytidine
  modified_base 15: mod_base = OTHER; note = 5-methyl cytidine
gtgttttgcttggtcaagagga

SEQ ID NO: 370 - DNA, 24 bp, synthetic construct
  source 1..24: mol_type = other DNA
  modified_base 1..24: mod_base = OTHER; note = Phosphorothioate linkage
  modified_base 1..7: mod_base = OTHER; note = 2'-O-(2-methoxyethyl) ribonucleotide
  misc_feature 1..7: note = RNA
  misc_feature 8..17: note = DNA
  misc_feature 18..24: note = RNA
  modified_base 18..24: mod_base = OTHER; note = 2'-O-(2-methoxyethyl) ribonucleotide
  modified_base 10: mod_base = OTHER; note = 5-methyl cytidine
  modified_base 16: mod_base = OTHER; note = 5-methyl cytidine
tgtgttttgcttggtcaagaggaa

SEQ ID NO: 371 - RNA, 24 nt, synthetic construct
  source 1..24: mol_type = other RNA
  modified_base 1..24: mod_base = OTHER; note = Phosphorothioate linkage
  modified_base 1..24: mod_base = OTHER; note = 2'-O-(2-methoxyethyl) ribonucleotide
  modified_base 10: mod_base = OTHER; note = 5-methyl cytidine
  modified_base 16: mod_base = OTHER; note = 5-methyl cytidine
tgtgttttgcttggtcaagaggaa

SEQ ID NO: 372 - DNA, 24 bp, synthetic construct
  source 1..24: mol_type = other DNA
  modified_base 1..24: mod_base = OTHER; note = Phosphorothioate linkage
  modified_base 1..5: mod_base = OTHER; note = 2'-O-(2-methoxyethyl) ribonucleotide
  misc_feature 1..5: note = RNA
  misc_feature 6..7: note = DNA
  misc_feature 8: note = RNA
  modified_base 8: mod_base = OTHER; note = 2'-O-(2-methoxyethyl) ribonucleotide
  misc_feature 9..10: note = DNA
  misc_feature 11: note = RNA
  modified_base 11: mod_base = OTHER; note = 2'-O-(2-methoxyethyl) ribonucleotide
  misc_feature 12..13: note = DNA
  misc_feature 14: note = RNA
  modified_base 14: mod_base = OTHER; note = 2'-O-(2-methoxyethyl) ribonucleotide
  misc_feature 15..16: note = DNA
  misc_feature 17: note = RNA
  modified_base 17: mod_base = OTHER; note = 2'-O-(2-methoxyethyl) ribonucleotide
  misc_feature 18..19: note = DNA
  misc_feature 20..24: note = RNA
  modified_base 20..24: mod_base = OTHER; note = 2'-O-(2-methoxyethyl) ribonucleotide
  modified_base 10: mod_base = OTHER; note = 5-methyl cytidine
  modified_base 16: mod_base = OTHER; note = 5-methyl cytidine
tgtgttttgcttggtcaagaggaa

SEQ ID NO: 373 - DNA, 24 bp, synthetic construct
  source 1..24: mol_type = other DNA
  modified_base 1..24: mod_base = OTHER; note = Phosphorothioate linkage
  modified_base 1..5: mod_base = OTHER; note = 2'-O-(2-methoxyethyl) ribonucleotide
  misc_feature 1..5: note = RNA
  misc_feature 6..7: note = DNA
  misc_feature 8: note = RNA
  modified_base 8: mod_base = OTHER; note = Locked nucleic acid
  misc_feature 9..10: note = DNA
  misc_feature 11: note = RNA
  modified_base 11: mod_base = OTHER; note = Locked nucleic acid
  misc_feature 12..13: note = DNA
  misc_feature 14: note = RNA
  modified_base 14: mod_base = OTHER; note = Locked nucleic acid
  misc_feature 15..16: note = DNA
  misc_feature 17: note = RNA
  modified_base 17: mod_base = OTHER; note = Locked nucleic acid
  misc_feature 18..19: note = DNA
  misc_feature 20..24: note = RNA
  modified_base 20..24: mod_base = OTHER; note = 2'-O-(2-methoxyethyl) ribonucleotide
  modified_base 10: mod_base = OTHER; note = 5-methyl cytidine
  modified_base 16: mod_base = OTHER; note = 5-methyl cytidine
tgtgttttgcttggtcaagaggaa

SEQ ID NO: 374 - DNA, 22 bp, synthetic construct
  source 1..22: mol_type = other DNA
  modified_base 1..22: mod_base = OTHER; note = Phosphorothioate linkage
  modified_base 1..5: mod_base = OTHER; note = 2'-O-(2-methoxyethyl) ribonucleotide
  misc_feature 1..6: note = RNA
  misc_feature 7..16: note = DNA
  misc_feature 17..22: note = RNA
  modified_base 17..22: mod_base = OTHER; note = 2'-O-(2-methoxyethyl) ribonucleotide
  modified_base 1: mod_base = OTHER; note = 5-methyl cytidine
  modified_base 3..8: mod_base = OTHER; note = 5-methyl cytidine
  modified_base 10: mod_base = OTHER; note = 5-methyl cytidine
  modified_base 12..13: mod_base = OTHER; note = 5-methyl cytidine
  modified_base 20..22: mod_base = OTHER; note = 5-methyl cytidine
cacccccctcaccttggttccc

SEQ ID NO: 375 - RNA, 22 nt, synthetic construct
  source 1..22: mol_type = other RNA
  modified_base 1..22: mod_base = OTHER; note = Phosphorothioate linkage
  modified_base 1..22: mod_base = OTHER; note = 2'-O-(2-methoxyethyl) ribonucleotide
  modified_base 1: mod_base = OTHER; note = 5-methyl cytidine
  modified_base 3..8: mod_base = OTHER; note = 5-methyl cytidine
  modified_base 10: mod_base = OTHER; note = 5-methyl cytidine
  modified_base 12..13: mod_base = OTHER; note = 5-methyl cytidine
  modified_base 20..22: mod_base = OTHER; note = 5-methyl cytidine
cacccccctcaccttggttccc

SEQ ID NO: 376 - DNA, 22 bp, synthetic construct
  source 1..22: mol_type = other DNA
  modified_base 1..22: mod_base = OTHER; note = Phosphorothioate linkage
  modified_base 1..5: mod_base = OTHER; note = 2'-O-(2-methoxyethyl) ribonucleotide
  misc_feature 1..5: note = RNA
  misc_feature 6..8: note = DNA
  misc_feature 9: note = RNA
  misc_feature 10..13: note = DNA
  misc_feature 14: note = RNA
  misc_feature 15..17: note = DNA
  misc_feature 18..22: note = RNA
  modified_base 17..22: mod_base = OTHER; note = 2'-O-(2-methoxyethyl) ribonucleotide
  modified_base 1: mod_base = OTHER; note = 5-methyl cytidine
  modified_base 3..8: mod_base = OTHER; note = 5-methyl cytidine
  modified_base 10: mod_base = OTHER; note = 5-methyl cytidine
  modified_base 12..13: mod_base = OTHER; note = 5-methyl cytidine
  modified_base 20..22: mod_base = OTHER; note = 5-methyl cytidine
cacccccctcaccttggttccc

SEQ ID NO: 377 - DNA, 22 bp, synthetic construct
  source 1..22: mol_type = other DNA
  modified_base 1..22: mod_base = OTHER; note = Phosphorothioate linkage
  modified_base 1..5: mod_base = OTHER; note = 2'-O-(2-methoxyethyl) ribonucleotide
  modified_base 6: mod_base = OTHER; note = Locked nucleic acid
  misc_feature 1..6: note = RNA
  misc_feature 7..8: note = DNA
  misc_feature 9: note = RNA
  misc_feature 10..13: note = DNA
  misc_feature 14: note = RNA
  misc_feature 15..16: note = DNA
  misc_feature 17..22: note = RNA
  modified_base 9: mod_base = OTHER; note = Locked nucleic acid
  modified_base 14: mod_base = OTHER; note = Locked nucleic acid
  modified_base 17: mod_base = OTHER; note = Locked nucleic acid
  modified_base 18..22: mod_base = OTHER; note = 2'-O-(2-methoxyethyl) ribonucleotide
  modified_base 1: mod_base = OTHER; note = 5-methyl cytidine
  modified_base 3..8: mod_base = OTHER; note = 5-methyl cytidine
  modified_base 10: mod_base = OTHER; note = 5-methyl cytidine
  modified_base 12..13: mod_base = OTHER; note = 5-methyl cytidine
  modified_base 20..22: mod_base = OTHER; note = 5-methyl cytidine
cacccccctcaccttggttccc

SEQ ID NO: 378 - DNA, 24 bp, synthetic construct
  source 1..24: mol_type = other DNA
  modified_base 1..24: mod_base = OTHER; note = Phosphorothioate linkage
  modified_base 1..7: mod_base = OTHER; note = 2'-O-(2-methoxyethyl) ribonucleotide
  misc_feature 1..7: note = RNA
  misc_feature 8..17: note = DNA
  misc_feature 18..24: note = RNA
  modified_base 18..24: mod_base = OTHER; note = 2'-O-(2-methoxyethyl) ribonucleotide
  modified_base 2: mod_base = OTHER; note = 5-methyl cytidine
  modified_base 4..9: mod_base = OTHER; note = 5-methyl cytidine
  modified_base 11: mod_base = OTHER; note = 5-methyl cytidine
  modified_base 13..14: mod_base = OTHER; note = 5-methyl cytidine
  modified_base 21..24: mod_base = OTHER; note = 5-methyl cytidine
tcacccccctcaccttggttcccc

SEQ ID NO: 379 - RNA, 24 nt, synthetic construct
  source 1..24: mol_type = other RNA
  modified_base 1..24: mod_base = OTHER; note = Phosphorothioate linkage
  modified_base 1..24: mod_base = OTHER; note = 2'-O-(2-methoxyethyl) ribonucleotide
  modified_base 2: mod_base = OTHER; note = 5-methyl cytidine
  modified_base 4..9: mod_base = OTHER; note = 5-methyl cytidine
  modified_base 11: mod_base = OTHER; note = 5-methyl cytidine
  modified_base 13..14: mod_base = OTHER; note = 5-methyl cytidine
  modified_base 21..24: mod_base = OTHER; note = 5-methyl cytidine
tcacccccctcaccttggttcccc

SEQ ID NO: 380 - DNA, 24 bp, synthetic construct
  source 1..24: mol_type = other DNA
  modified_base 1..24: mod_base = OTHER; note = Phosphorothioate linkage
  modified_base 1..5: mod_base = OTHER; note = 2'-O-(2-methoxyethyl) ribonucleotide
  misc_feature 1..5: note = RNA
  misc_feature 6..7: note = DNA
  misc_feature 8: note = RNA
  modified_base 8: mod_base = OTHER; note = 2'-O-(2-methoxyethyl) ribonucleotide
  misc_feature 9..10: note = DNA
  misc_feature 11: note = RNA
  modified_base 11: mod_base = OTHER; note = 2'-O-(2-methoxyethyl) ribonucleotide
  misc_feature 12..13: note = DNA
  misc_feature 14: note = RNA
  modified_base 14: mod_base = OTHER; note = 2'-O-(2-methoxyethyl) ribonucleotide
  misc_feature 15..16: note = DNA
  misc_feature 17: note = RNA
  modified_base 17: mod_base = OTHER; note = 2'-O-(2-methoxyethyl) ribonucleotide
  misc_feature 18..19: note = DNA
  misc_feature 20..24: note = RNA
  modified_base 20..24: mod_base = OTHER; note = 2'-O-(2-methoxyethyl) ribonucleotide
  modified_base 2: mod_base = OTHER; note = 5-methyl cytidine
  modified_base 4..9: mod_base = OTHER; note = 5-methyl cytidine
  modified_base 11: mod_base = OTHER; note = 5-methyl cytidine
  modified_base 13..14: mod_base = OTHER; note = 5-methyl cytidine
  modified_base 21..24: mod_base = OTHER; note = 5-methyl cytidine
tcacccccctcaccttggttcccc

SEQ ID NO: 381 - DNA, 24 bp, synthetic construct
  source 1..24: mol_type = other DNA
  modified_base 1..24: mod_base = OTHER; note = Phosphorothioate linkage
  modified_base 1..5: mod_base = OTHER; note = 2'-O-(2-methoxyethyl) ribonucleotide
  misc_feature 1..5: note = RNA
  misc_feature 6..7: note = DNA
  misc_feature 8: note = RNA
  modified_base 8: mod_base = OTHER; note = Locked nucleic acid
  misc_feature 9..10: note = DNA
  misc_feature 11: note = RNA
  modified_base 11: mod_base = OTHER; note = Locked nucleic acid
  misc_feature 12..13: note = DNA
  misc_feature 14: note = RNA
  modified_base 14: mod_base = OTHER; note = Locked nucleic acid
  misc_feature 15..16: note = DNA
  misc_feature 17: note = RNA
  modified_base 17: mod_base = OTHER; note = Locked nucleic acid
  misc_feature 18..19: note = DNA
  misc_feature 20..24: note = RNA
  modified_base 20..24: mod_base = OTHER; note = 2'-O-(2-methoxyethyl) ribonucleotide
  modified_base 2: mod_base = OTHER; note = 5-methyl cytidine
  modified_base 4..9: mod_base = OTHER; note = 5-methyl cytidine
  modified_base 11: mod_base = OTHER; note = 5-methyl cytidine
  modified_base 13..14: mod_base = OTHER; note = 5-methyl cytidine
  modified_base 21..24: mod_base = OTHER; note = 5-methyl cytidine
tcacccccctcaccttggttcccc

SEQ ID NO: 382 - RNA, 20 nt, synthetic construct
  source 1..20: mol_type = other RNA
  modified_base 1..20: mod_base = OTHER; note = 2'-O-(2-methoxyethyl) ribonucleotide
  modified_base 18..19: mod_base = OTHER; note = 5-methyl cytidine
ttaggaggattatttaacct

SEQ ID NO: 383 - DNA, 20 bp, synthetic construct
  source 1..20: mol_type = other DNA
  modified_base 1..20: mod_base = OTHER; note = Phosphorothioate linkage
  modified_base 1..5: mod_base = OTHER; note = 2'-O-(2-methoxyethyl) ribonucleotide
  misc_feature 1..5: note = RNA
  misc_feature 6..15: note = DNA
  misc_feature 16..20: note = RNA
  modified_base 16..20: mod_base = OTHER; note = 2'-O-(2-methoxyethyl) ribonucleotide
  modified_base 1: mod_base = OTHER; note = 5-methyl cytidine
  modified_base 19..20: mod_base = OTHER; note = 5-methyl cytidine
cttaggaggattatttaacc

SEQ ID NO: 384 - RNA, 20 nt, synthetic construct
  source 1..20: mol_type = other RNA
  modified_base 1..20: mod_base = OTHER; note = 2'-O-(2-methoxyethyl) ribonucleotide
  modified_base 1..2: mod_base = OTHER; note = 5-methyl cytidine
  modified_base 20: mod_base = OTHER; note = 5-methyl cytidine
ccttaggaggattatttaac

SEQ ID NO: 385 - RNA, 20 nt, synthetic construct
  source 1..20: mol_type = other RNA
  modified_base 1..20: mod_base = OTHER; note = 2'-O-(2-methoxyethyl) ribonucleotide
  modified_base 2: mod_base = OTHER; note = 5-methyl cytidine
  modified_base 4..5: mod_base = OTHER; note = 5-methyl cytidine
acaccttaggaggattattt

SEQ ID NO: 386 - RNA, 20 nt, synthetic construct
  source 1..20: mol_type = other RNA
  modified_base 1..20: mod_base = OTHER; note = 2'-O-(2-methoxyethyl) ribonucleotide
  modified_base 4: mod_base = OTHER; note = 5-methyl cytidine
  modified_base 6..7: mod_base = OTHER; note = 5-methyl cytidine
ttacaccttaggaggattat

SEQ ID NO: 387 - RNA, 20 nt, synthetic construct
  source 1..20: mol_type = other RNA
  modified_base 1..20: mod_base = OTHER; note = 2'-O-(2-methoxyethyl) ribonucleotide
  modified_base 6: mod_base = OTHER; note = 5-methyl cytidine
  modified_base 8..9: mod_base = OTHER; note = 5-methyl cytidine
tgttacaccttaggaggatt

SEQ ID NO: 388 - RNA, 20 nt, synthetic construct
  source 1..20: mol_type = other RNA
  modified_base 1..20: mod_base = OTHER; note = 2'-O-(2-methoxyethyl) ribonucleotide
  modified_base 10: mod_base = OTHER; note = 5-methyl cytidine
  modified_base 12..13: mod_base = OTHER; note = 5-methyl cytidine
tagttgttacaccttaggag

SEQ ID NO: 389 - RNA, 20 nt, synthetic construct
  source 1..20: mol_type = other RNA
  modified_base 1..20: mod_base = OTHER; note = 2'-O-(2-methoxyethyl) ribonucleotide
  modified_base 2: mod_base = OTHER; note = 5-methyl cytidine
  modified_base 12: mod_base = OTHER; note = 5-methyl cytidine
  modified_base 14..15: mod_base = OTHER; note = 5-methyl cytidine
actagttgttacaccttagg

SEQ ID NO: 390 - DNA, 20 bp, synthetic construct
  source 1..20: mol_type = other DNA
  modified_base 1..20: mod_base = OTHER; note = Phosphorothioate linkage
  modified_base 1..5: mod_base = OTHER; note = 2'-O-(2-methoxyethyl) ribonucleotide
  modified_base 6: mod_base = OTHER; note = Locked nucleic acid
  misc_feature 1..6: note = RNA
  misc_feature 7..8: note = DNA
  misc_feature 9: note = RNA
  misc_feature 10..11: note = DNA
  misc_feature 12: note = RNA
  misc_feature 13..14: note = DNA
  misc_feature 15..20: note = RNA
  modified_base 15: mod_base = OTHER; note = Locked amino acid
  modified_base 16..20: mod_base = OTHER; note = 2'-O-(2-methoxyethyl) ribonucleotide
  modified_base 1: mod_base = OTHER; note = 5-methyl cytidine
  modified_base 19..20: mod_base = OTHER; note = 5-methyl cytidine
cttaggaggattatttaacc

SEQ ID NO: 391 - DNA, 20 bp, synthetic construct
  source 1..20: mol_type = other DNA
  modified_base 1..20: mod_base = OTHER; note = Phosphorothioate linkage
  modified_base 1..3: mod_base = OTHER; note = 2'-O-(2-methoxyethyl) ribonucleotide
  modified_base 4: mod_base = OTHER; note = Locked nucleic acid
  modified_base 5: mod_base = OTHER; note = 2'-O-(2-methoxyethyl) ribonucleotide
  misc_feature 1..5: note = RNA
  misc_feature 6..7: note = DNA
  misc_feature 8: note = RNA
  modified_base 8: mod_base = OTHER; note = Locked amino acid
  misc_feature 9..11: note = DNA
  misc_feature 12: note = RNA
  modified_base 12: mod_base = OTHER; note = Locked amino acid
  misc_feature 13..15: note = DNA
  misc_feature 16..20: note = RNA
  modified_base 16: mod_base = OTHER; note = Locked amino acid
  modified_base 17..20: mod_base = OTHER; note = 2'-O-(2-methoxyethyl) ribonucleotide
  modified_base 1: mod_base = OTHER; note = 5-methyl cytidine
  modified_base 19..20: mod_base = OTHER; note = 5-methyl cytidine
cttaggaggattatttaacc

SEQ ID NO: 392 - DNA, 20 bp, synthetic construct
  source 1..20: mol_type = other DNA
  modified_base 1..20: mod_base = OTHER; note = Phosphorothioate linkage
  modified_base 1..4: mod_base = OTHER; note = 2'-O-(2-methoxyethyl) ribonucleotide
  modified_base 5: mod_base = OTHER; note = Locked nucleic acid
  misc_feature 1..5: note = RNA
  misc_feature 6..8: note = DNA
  misc_feature 9: note = RNA
  modified_base 9: mod_base = OTHER; note = Locked amino acid
  misc_feature 10..12: note = DNA
  misc_feature 13: note = RNA
  modified_base 13: mod_base = OTHER; note = Locked amino acid
  misc_feature 14..15: note = DNA
  misc_feature 16..20: note = RNA
  modified_base 16: mod_base = OTHER; note = 2'-O-(2-methoxyethyl) ribonucleotide
  modified_base 17: mod_base = OTHER; note = Locked amino acid
  modified_base 18..20: mod_base = OTHER; note = 2'-O-(2-methoxyethyl) ribonucleotide
  modified_base 1: mod_base = OTHER; note = 5-methyl cytidine
  modified_base 19..20: mod_base = OTHER; note = 5-methyl cytidine
cttaggaggattatttaacc

SEQ ID NO: 393 - RNA, 20 nt, synthetic construct
  source 1..20: mol_type = other RNA
  modified_base 1..20: mod_base = OTHER; note = Phosphorothioate linkage
  modified_base 1..3: mod_base = OTHER; note = 2'-O-(2-methoxyethyl) ribonucleotide
  modified_base 4: mod_base = OTHER; note = Locked nucleic acid
  modified_base 5: mod_base = OTHER; note = 2'-O-(2-methoxyethyl) ribonucleotide
  modified_base 6: mod_base = OTHER; note = Locked nucleic acid
  modified_base 7: mod_base = OTHER; note = 2'-O-(2-methoxyethyl) ribonucleotide
  modified_base 8: mod_base = OTHER; note = Locked nucleic acid
  modified_base 9: mod_base = OTHER; note = 2'-O-(2-methoxyethyl) ribonucleotide
  modified_base 10: mod_base = OTHER; note = Locked nucleic acid
  modified_base 11: mod_base = OTHER; note = 2'-O-(2-methoxyethyl) ribonucleotide
  modified_base 12: mod_base = OTHER; note = Locked nucleic acid
  modified_base 13: mod_base = OTHER; note = 2'-O-(2-methoxyethyl) ribonucleotide
  modified_base 14: mod_base = OTHER; note = Locked nucleic acid
  modified_base 15: mod_base = OTHER; note = 2'-O-(2-methoxyethyl) ribonucleotide
  modified_base 16: mod_base = OTHER; note = Locked nucleic acid
  modified_base 17: mod_base = OTHER; note = 2'-O-(2-methoxyethyl) ribonucleotide
  modified_base 18: mod_base = OTHER; note = Locked nucleic acid
  modified_base 19..20: mod_base = OTHER; note = 2'-O-(2-methoxyethyl) ribonucleotide
  modified_base 1: mod_base = OTHER; note = 5-methyl cytidine
  modified_base 19..20: mod_base = OTHER; note = 5-methyl cytidine
cttaggaggattatttaacc

SEQ ID NO: 394 - RNA, 20 nt, synthetic construct
  source 1..20: mol_type = other RNA
  modified_base 1..20: mod_base = OTHER; note = Phosphorothioate linkage
  modified_base 1..2: mod_base = OTHER; note = 2'-O-(2-methoxyethyl) ribonucleotide
  modified_base 3: mod_base = OTHER; note = Locked nucleic acid
  modified_base 4: mod_base = OTHER; note = 2'-O-(2-methoxyethyl) ribonucleotide
  modified_base 5: mod_base = OTHER; note = Locked nucleic acid
  modified_base 6: mod_base = OTHER; note = 2'-O-(2-methoxyethyl) ribonucleotide
  modified_base 7: mod_base = OTHER; note = Locked nucleic acid
  modified_base 8: mod_base = OTHER; note = 2'-O-(2-methoxyethyl) ribonucleotide
  modified_base 9: mod_base = OTHER; note = Locked nucleic acid
  modified_base 10: mod_base = OTHER; note = 2'-O-(2-methoxyethyl) ribonucleotide
  modified_base 11: mod_base = OTHER; note = Locked nucleic acid
  modified_base 12: mod_base = OTHER; note = 2'-O-(2-methoxyethyl) ribonucleotide
  modified_base 13: mod_base = OTHER; note = Locked nucleic acid
  modified_base 14: mod_base = OTHER; note = 2'-O-(2-methoxyethyl) ribonucleotide
  modified_base 15: mod_base = OTHER; note = Locked nucleic acid
  modified_base 16: mod_base = OTHER; note = 2'-O-(2-methoxyethyl) ribonucleotide
  modified_base 17: mod_base = OTHER; note = Locked nucleic acid
  modified_base 18..20: mod_base = OTHER; note = 2'-O-(2-methoxyethyl) ribonucleotide
  modified_base 1: mod_base = OTHER; note = 5-methyl cytidine
  modified_base 19..20: mod_base = OTHER; note = 5-methyl cytidine
cttaggaggattatttaacc

SEQ ID NO: 395 - RNA, 20 nt, synthetic construct
  source 1..20: mol_type = other RNA
  modified_base 1..20: mod_base = OTHER; note = Phosphorothioate linkage
  modified_base 1..2: mod_base = OTHER; note = 2'-O-(2-methoxyethyl) ribonucleotide
  modified_base 3: mod_base = OTHER; note = Locked nucleic acid
  modified_base 4..5: mod_base = OTHER; note = 2'-O-(2-methoxyethyl) ribonucleotide
  modified_base 6: mod_base = OTHER; note = Locked nucleic acid
  modified_base 7..8: mod_base = OTHER; note = 2'-O-(2-methoxyethyl) ribonucleotide
  modified_base 9: mod_base = OTHER; note = Locked nucleic acid
  modified_base 10..11: mod_base = OTHER; note = 2'-O-(2-methoxyethyl) ribonucleotide
  modified_base 12: mod_base = OTHER; note = Locked nucleic acid
  modified_base 13..14: mod_base = OTHER; note = 2'-O-(2-methoxyethyl) ribonucleotide
  modified_base 15: mod_base = OTHER; note = Locked nucleic acid
  modified_base 16..17: mod_base = OTHER; note = 2'-O-(2-methoxyethyl) ribonucleotide
  modified_base 18: mod_base = OTHER; note = Locked nucleic acid
  modified_base 19..20: mod_base = OTHER; note = 2'-O-(2-methoxyethyl) ribonucleotide
  modified_base 1: mod_base = OTHER; note = 5-methyl cytidine
  modified_base 19..20: mod_base = OTHER; note = 5-methyl cytidine
cttaggaggattatttaacc

SEQ ID NO: 396 - RNA, 20 nt, synthetic construct
  source 1..20: mol_type = other RNA
  modified_base 1..20: mod_base = OTHER; note = Phosphorothioate linkage
  modified_base 1..4: mod_base = OTHER; note = 2'-O-(2-methoxyethyl) ribonucleotide
  modified_base 5: mod_base = OTHER; note = Locked nucleic acid
  modified_base 6..8: mod_base = OTHER; note = 2'-O-(2-methoxyethyl) ribonucleotide
  modified_base 9: mod_base = OTHER; note = Locked nucleic acid
  modified_base 10..12: mod_base = OTHER; note = 2'-O-(2-methoxyethyl) ribonucleotide
  modified_base 13: mod_base = OTHER; note = Locked nucleic acid
  modified_base 14..16: mod_base = OTHER; note = 2'-O-(2-methoxyethyl) ribonucleotide
  modified_base 17: mod_base = OTHER; note = Locked nucleic acid
  modified_base 18..20: mod_base = OTHER; note = 2'-O-(2-methoxyethyl) ribonucleotide
  modified_base 1: mod_base = OTHER; note = 5-methyl cytidine
  modified_base 19..20: mod_base = OTHER; note = 5-methyl cytidine
cttaggaggattatttaacc

SEQ ID NO: 397 - RNA, 20 nt, synthetic construct
  source 1..20: mol_type = other RNA
  modified_base 1..20: mod_base = OTHER; note = Phosphorothioate linkage
  modified_base 1..3: mod_base = OTHER; note = 2'-O-(2-methoxyethyl) ribonucleotide
  modified_base 4: mod_base = OTHER; note = Locked nucleic acid
  modified_base 5..7: mod_base = OTHER; note = 2'-O-(2-methoxyethyl) ribonucleotide
  modified_base 8: mod_base = OTHER; note = Locked nucleic acid
  modified_base 9..11: mod_base = OTHER; note = 2'-O-(2-methoxyethyl) ribonucleotide
  modified_base 12: mod_base = OTHER; note = Locked nucleic acid
  modified_base 13..15: mod_base = OTHER; note = 2'-O-(2-methoxyethyl) ribonucleotide
  modified_base 16: mod_base = OTHER; note = Locked nucleic acid
  modified_base 17..20: mod_base = OTHER; note = 2'-O-(2-methoxyethyl) ribonucleotide
  modified_base 1: mod_base = OTHER; note = 5-methyl cytidine
  modified_base 19..20: mod_base = OTHER; note = 5-methyl cytidine
cttaggaggattatttaacc

SEQ ID NO: 398 - RNA, 20 nt, synthetic construct
  source 1..20: mol_type = other RNA
  modified_base 1..20: mod_base = OTHER; note = Phosphorothioate linkage
  modified_base 1..5: mod_base = OTHER; note = 2'-O-(2-methoxyethyl) ribonucleotide
  modified_base 6: mod_base = OTHER; note = Locked nucleic acid
  modified_base 7..10: mod_base = OTHER; note = 2'-O-(2-methoxyethyl) ribonucleotide
  modified_base 11: mod_base = OTHER; note = Locked nucleic acid
  modified_base 12..15: mod_base = OTHER; note = 2'-O-(2-methoxyethyl) ribonucleotide
  modified_base 16: mod_base = OTHER; note = Locked nucleic acid
  modified_base 17..20: mod_base = OTHER; note = 2'-O-(2-methoxyethyl) ribonucleotide
  modified_base 1: mod_base = OTHER; note = 5-methyl cytidine
  modified_base 19..20: mod_base = OTHER; note = 5-methyl cytidine
cttaggaggattatttaacc

SEQ ID NO: 399 - RNA, 20 nt, synthetic construct
  source 1..20: mol_type = other RNA
  modified_base 1..20: mod_base = OTHER; note = Phosphorothioate linkage
  modified_base 1..3: mod_base = OTHER; note = 2'-O-(2-methoxyethyl) ribonucleotide
  modified_base 4: mod_base = OTHER; note = Locked nucleic acid
  modified_base 5: mod_base = OTHER; note = 2'-O-(2-methoxyethyl) ribonucleotide
  modified_base 6: mod_base = OTHER; note = Locked nucleic acid
  modified_base 7: mod_base = OTHER; note = 2'-O-(2-methoxyethyl) ribonucleotide
  modified_base 8: mod_base = OTHER; note = Locked nucleic acid
  modified_base 9: mod_base = OTHER; note = 2'-O-(2-methoxyethyl) ribonucleotide
  modified_base 10: mod_base = OTHER; note = Locked nucleic acid
  modified_base 11: mod_base = OTHER; note = 2'-O-(2-methoxyethyl) ribonucleotide
  modified_base 12: mod_base = OTHER; note = Locked nucleic acid
  modified_base 13: mod_base = OTHER; note = 2'-O-(2-methoxyethyl) ribonucleotide
  modified_base 14: mod_base = OTHER; note = Locked nucleic acid
  modified_base 15: mod_base = OTHER; note = 2'-O-(2-methoxyethyl) ribonucleotide
  modified_base 16: mod_base = OTHER; note = Locked nucleic acid
  modified_base 17: mod_base = OTHER; note = 2'-O-(2-methoxyethyl) ribonucleotide
  modified_base 18: mod_base = OTHER; note = Locked nucleic acid
  modified_base 19..20: mod_base = OTHER; note = 2'-O-(2-methoxyethyl) ribonucleotide
  modified_base 1: mod_base = OTHER; note = 5-methyl cytidine
  modified_base 19..20: mod_base = OTHER; note = 5-methyl cytidine
cttaggaggattatttaacc

SEQ ID NO: 400 - DNA, 22 bp, synthetic construct
  source 1..22: mol_type = other DNA
  modified_base 1..22: mod_base = OTHER; note = Phosphorothioate linkage
  modified_base 1..6: mod_base = OTHER; note = 2'-O-(2-methoxyethyl) ribonucleotide
  misc_feature 1..6: note = RNA
  misc_feature 7..16: note = DNA
  misc_feature 17..22: note = RNA
  modified_base 17..22: mod_base = OTHER; note = 2'-O-(2-methoxyethyl) ribonucleotide
  modified_base 1..2: mod_base = OTHER; note = 5-methyl cytidine
  modified_base 20..21: mod_base = OTHER; note = 5-methyl cytidine
ccttaggaggattatttaacct

SEQ ID NO: 401 - RNA, 22 nt, synthetic construct
  source 1..22: mol_type = other RNA
  modified_base 1..22: mod_base = OTHER; note = Phosphorothioate linkage
  modified_base 1..22: mod_base = OTHER; note = 2'-O-(2-methoxyethyl) ribonucleotide
  modified_base 1..2: mod_base = OTHER; note = 5-methyl cytidine
  modified_base 20..21: mod_base = OTHER; note = 5-methyl cytidine
ccttaggaggattatttaacct

SEQ ID NO: 402 - DNA, 22 bp, synthetic construct
  source 1..22: mol_type = other DNA
  modified_base 1..22: mod_base = OTHER; note = Phosphorothioate linkage
  modified_base 1..5: mod_base = OTHER; note = 2'-O-(2-methoxyethyl) ribonucleotide
  misc_feature 1..5: note = RNA
  misc_feature 6..8: note = DNA
  misc_feature 9: note = RNA
  modified_base 9: mod_base = OTHER; note = 2'-O-(2-methoxyethyl) ribonucleotide
  misc_feature 10..13: note = DNA
  misc_feature 14: note = RNA
  modified_base 14: mod_base = OTHER; note = 2'-O-(2-methoxyethyl) ribonucleotide
  misc_feature 15..17: note = DNA
  misc_feature 18..22: note = RNA
  modified_base 1..2: mod_base = OTHER; note = 5-methyl cytidine
  modified_base 20..21: mod_base = OTHER; note = 5-methyl cytidine
ccttaggaggattatttaacct

SEQ ID NO: 403 - DNA, 22 bp, synthetic construct
  source 1..22: mol_type = other DNA
  modified_base 1..22: mod_base = OTHER; note = Phosphorothioate linkage
  modified_base 1..5: mod_base = OTHER; note = 2'-O-(2-methoxyethyl) ribonucleotide
  misc_feature 1..6: note = RNA
  misc_feature 7..8: note = DNA
  misc_feature 9: note = RNA
  modified_base 9: mod_base = OTHER; note = Locked nucleic acid
  misc_feature 10..13: note = DNA
  misc_feature 14: note = RNA
  modified_base 14: mod_base = OTHER; note = Locked nucleic acid
  misc_feature 15..16: note = DNA
  misc_feature 17..22: note = RNA
  modified_base 17: mod_base = OTHER; note = Locked nucleic acid
  modified_base 1..2: mod_base = OTHER; note = 5-methyl cytidine
  modified_base 20..21: mod_base = OTHER; note = 5-methyl cytidine
ccttaggaggattatttaacct

SEQ ID NO: 404 - DNA, 24 bp, synthetic construct
  source 1..24: mol_type = other DNA
  modified_base 1..24: mod_base = OTHER; note = Phosphorothioate linkage
  modified_base 1..7: mod_base = OTHER; note = 2'-O-(2-methoxyethyl) ribonucleotide
  misc_feature 1..7: note = RNA
  misc_feature 8..17: note = DNA
  misc_feature 18..24: note = RNA
  modified_base 18..24: mod_base = OTHER; note = 2'-O-(2-methoxyethyl) ribonucleotide
  modified_base 2..3: mod_base = OTHER; note = 5-methyl cytidine
  modified_base 21..22: mod_base = OTHER; note = 5-methyl cytidine
  modified_base 24: mod_base = OTHER; note = 5-methyl cytidine
accttaggaggattatttaacctc

SEQ ID NO: 405 - RNA, 24 nt, synthetic construct
  source 1..24: mol_type = other RNA
  modified_base 1..24: mod_base = OTHER; note = Phosphorothioate linkage
  modified_base 1..24: mod_base = OTHER; note = 2'-O-(2-methoxyethyl) ribonucleotide
  modified_base 2..3: mod_base = OTHER; note = 5-methyl cytidine
  modified_base 21..22: mod_base = OTHER; note = 5-methyl cytidine
  modified_base 24: mod_base = OTHER; note = 5-methyl cytidine
accttaggaggattatttaacctc

SEQ ID NO: 406 - DNA, 24 bp, synthetic construct
  source 1..24: mol_type = other DNA
  modified_base 1..24: mod_base = OTHER; note = Phosphorothioate linkage
  modified_base 1..5: mod_base = OTHER; note = 2'-O-(2-methoxyethyl) ribonucleotide
  misc_feature 1..5: note = RNA
  misc_feature 6..7: note = DNA
  misc_feature 8: note = RNA
  modified_base 8: mod_base = OTHER; note = 2'-O-(2-methoxyethyl) ribonucleotide
  misc_feature 9..10: note = DNA
  misc_feature 11: note = RNA
  modified_base 11: mod_base = OTHER; note = 2'-O-(2-methoxyethyl) ribonucleotide
  misc_feature 12..13: note = DNA
  misc_feature 14: note = RNA
  modified_base 14: mod_base = OTHER; note = 2'-O-(2-methoxyethyl) ribonucleotide
  misc_feature 15..16: note = DNA
  misc_feature 17: note = RNA
  modified_base 17: mod_base = OTHER; note = 2'-O-(2-methoxyethyl) ribonucleotide
  misc_feature 18..19: note = DNA
  misc_feature 20..24: note = RNA
  modified_base 20..24: mod_base = OTHER; note = 2'-O-(2-methoxyethyl) ribonucleotide
  modified_base 2..3: mod_base = OTHER; note = 5-methyl cytidine
  modified_base 21..22: mod_base = OTHER; note = 5-methyl cytidine
  modified_base 24: mod_base = OTHER; note = 5-methyl cytidine
accttaggaggattatttaacctc

SEQ ID NO: 407 - DNA, 24 bp, synthetic construct
  source 1..24: mol_type = other DNA
  modified_base 1..24: mod_base = OTHER; note = Phosphorothioate linkage
  modified_base 1..5: mod_base = OTHER; note = 2'-O-(2-methoxyethyl) ribonucleotide
  misc_feature 1..5: note = RNA
  misc_feature 6..7: note = DNA
  misc_feature 8: note = RNA
  modified_base 8: mod_base = OTHER; note = Locked nucleic acid
  misc_feature 9..10: note = DNA
  misc_feature 11: note = RNA
  modified_base 11: mod_base = OTHER; note = Locked nucleic acid
  misc_feature 12..13: note = DNA
  misc_feature 14: note = RNA
  modified_base 14: mod_base = OTHER; note = Locked nucleic acid
  misc_feature 15..16: note = DNA
  misc_feature 17: note = RNA
  modified_base 17: mod_base = OTHER; note = Locked nucleic acid
  misc_feature 18..19: note = DNA
  misc_feature 20..24: note = RNA
  modified_base 20..24: mod_base = OTHER; note = 2'-O-(2-methoxyethyl) ribonucleotide
  modified_base 2..3: mod_base = OTHER; note = 5-methyl cytidine
  modified_base 21..22: mod_base = OTHER; note = 5-methyl cytidine
  modified_base 24: mod_base = OTHER; note = 5-methyl cytidine
accttaggaggattatttaacctc

SEQ ID NO: 408 - RNA, 20 nt, synthetic construct
  source 1..20: mol_type = other RNA
  modified_base 1..20: mod_base = OTHER; note = Phosphorothioate linkage
  modified_base 1..20: mod_base = OTHER; note = 2'-O-(2-methoxyethyl) ribonucleotide
  modified_base 5: mod_base = OTHER; note = 5-methyl cytidine
  modified_base 9: mod_base = OTHER; note = 5-methyl cytidine
  modified_base 14: mod_base = OTHER; note = 5-methyl cytidine
  modified_base 16: mod_base = OTHER; note = 5-methyl cytidine
ggagcaaactaggcactgag

SEQ ID NO: 409 - DNA, 20 bp, synthetic construct
  source 1..20: mol_type = other DNA
  modified_base 1..20: mod_base = OTHER; note = Phosphorothioate linkage
  modified_base 1..5: mod_base = OTHER; note = 2'-O-(2-methoxyethyl) ribonucleotide
  misc_feature 1..5: note = RNA
  misc_feature 6..15: note = DNA
  misc_feature 16..20: note = RNA
  modified_base 16..20: mod_base = OTHER; note = 2'-O-(2-methoxyethyl) ribonucleotide
  modified_base 7: mod_base = OTHER; note = 5-methyl cytidine
  modified_base 11: mod_base = OTHER; note = 5-methyl cytidine
  modified_base 16: mod_base = OTHER; note = 5-methyl cytidine
  modified_base 18: mod_base = OTHER; note = 5-methyl cytidine
gtggagcaaactaggcactg

SEQ ID NO: 410 - RNA, 20 nt, synthetic construct
  source 1..20: mol_type = other RNA
  modified_base 1..20: mod_base = OTHER; note = Phosphorothioate linkage
  modified_base 1..20: mod_base = OTHER; note = 2'-O-(2-methoxyethyl) ribonucleotide
  modified_base 9: mod_base = OTHER; note = 5-methyl cytidine
  modified_base 13: mod_base = OTHER; note = 5-methyl cytidine
  modified_base 18: mod_base = OTHER; note = 5-methyl cytidine
  modified_base 20: mod_base = OTHER; note = 5-methyl cytidine
aggtggagcaaactaggcac

SEQ ID NO: 411 - RNA, 20 nt, synthetic construct
  source 1..20: mol_type = other RNA
  modified_base 1..20: mod_base = OTHER; note = Phosphorothioate linkage
  modified_base 1..20: mod_base = OTHER; note = 2'-O-(2-methoxyethyl) ribonucleotide
  modified_base 11: mod_base = OTHER; note = 5-methyl cytidine
  modified_base 15: mod_base = OTHER; note = 5-methyl cytidine
  modified_base 20: mod_base = OTHER; note = 5-methyl cytidine
ggaggtggagcaaactaggc

SEQ ID NO: 412 - RNA, 20 nt, synthetic construct
  source 1..20: mol_type = other RNA
  modified_base 1..20: mod_base = OTHER; note = Phosphorothioate linkage
  modified_base 1..20: mod_base = OTHER; note = 2'-O-(2-methoxyethyl) ribonucleotide
  modified_base 14: mod_base = OTHER; note = 5-methyl cytidine
  modified_base 18: mod_base = OTHER; note = 5-methyl cytidine
tgtggaggtggagcaaacta

SEQ ID NO: 413 - RNA, 20 nt, synthetic construct
  source 1..20: mol_type = other RNA
  modified_base 1..20: mod_base = OTHER; note = Phosphorothioate linkage
  modified_base 1..20: mod_base = OTHER; note = 2'-O-(2-methoxyethyl) ribonucleotide
  modified_base 16: mod_base = OTHER; note = 5-methyl cytidine
  modified_base 20: mod_base = OTHER; note = 5-methyl cytidine
gatgtggaggtggagcaaac

SEQ ID NO: 414 - RNA, 20 nt, synthetic construct
  source 1..20: mol_type = other RNA
  modified_base 1..20: mod_base = OTHER; note = Phosphorothioate linkage
  modified_base 1..20: mod_base = OTHER; note = 2'-O-(2-methoxyethyl) ribonucleotide
  modified_base 18: mod_base = OTHER; note = 5-methyl cytidine
atgatgtggaggtggagcaa

SEQ ID NO: 415 - RNA, 20 nt, synthetic construct
  source 1..20: mol_type = other RNA
  modified_base 1..20: mod_base = OTHER; note = Phosphorothioate linkage
  modified_base 1..20: mod_base = OTHER; note = 2'-O-(2-methoxyethyl) ribonucleotide
  modified_base 1: mod_base = OTHER; note = 5-methyl cytidine
  modified_base 5: mod_base = OTHER; note = 5-methyl cytidine
cagacatgatgtggaggtgg

SEQ ID NO: 416 - RNA, 20 nt, synthetic construct
  source 1..20: mol_type = other RNA
  modified_base 1..20: mod_base = OTHER; note = Phosphorothioate linkage
  modified_base 1..20: mod_base = OTHER; note = 2'-O-(2-methoxyethyl) ribonucleotide
  modified_base 4: mod_base = OTHER; note = 5-methyl cytidine
  modified_base 7: mod_base = OTHER; note = 5-methyl cytidine
  modified_base 16: mod_base = OTHER; note = 5-methyl cytidine
attctacagagggagcataa

SEQ ID NO: 417 - RNA, 20 nt, synthetic construct
  source 1..20: mol_type = other RNA
  modified_base 1..20: mod_base = OTHER; note = Phosphorothioate linkage
  modified_base 1..20: mod_base = OTHER; note = 2'-O-(2-methoxyethyl) ribonucleotide
  modified_base 7: mod_base = OTHER; note = 5-methyl cytidine
  modified_base 10: mod_base = OTHER; note = 5-methyl cytidine
  modified_base 19: mod_base = OTHER; note = 5-methyl cytidine
ttaattctacagagggagca

SEQ ID NO: 418 - RNA, 20 nt, synthetic construct
  source 1..20: mol_type = other RNA
  modified_base 1..20: mod_base = OTHER; note = Phosphorothioate linkage
  modified_base 1..20: mod_base = OTHER; note = 2'-O-(2-methoxyethyl) ribonucleotide
  modified_base 11: mod_base = OTHER; note = 5-methyl cytidine
  modified_base 14: mod_base = OTHER; note = 5-methyl cytidine
gttattaattctacagaggg

SEQ ID NO: 419 - RNA, 20 nt, synthetic construct
  source 1..20: mol_type = other RNA
  modified_base 1..20: mod_base = OTHER; note = Phosphorothioate linkage
  modified_base 1..20: mod_base = OTHER; note = 2'-O-(2-methoxyethyl) ribonucleotide
  modified_base 3: mod_base = OTHER; note = 5-methyl cytidine
  modified_base 14: mod_base = OTHER; note = 5-methyl cytidine
  modified_base 17: mod_base = OTHER; note = 5-methyl cytidine
ggcgttattaattctacaga

SEQ ID NO: 420 - DNA, 20 bp, synthetic construct
  source 1..20: mol_type = other DNA
  modified_base 1..20: mod_base = OTHER; note = Phosphorothioate linkage
  modified_base 1..20: mod_base = OTHER; note = 2'-O-(2-methoxyethyl) ribonucleotide
  misc_feature 1..5: note = RNA
  misc_feature 6..15: note = DNA
  misc_feature 16..20: note = RNA
  modified_base 4: mod_base = OTHER; note = 5-methyl cytidine
  modified_base 15: mod_base = OTHER; note = 5-methyl cytidine
  modified_base 18: mod_base = OTHER; note = 5-methyl cytidine
tggcgttattaattctacag

SEQ ID NO: 421 - RNA, 20 nt, synthetic construct
  source 1..20: mol_type = other RNA
  modified_base 1..20: mod_base = OTHER; note = Phosphorothioate linkage
  modified_base 1..20: mod_base = OTHER; note = 2'-O-(2-methoxyethyl) ribonucleotide
  modified_base 9: mod_base = OTHER; note = 5-methyl cytidine
  modified_base 20: mod_base = OTHER; note = 5-methyl cytidine
ttatttggcgttattaattc

SEQ ID NO: 422 - RNA, 20 nt, synthetic construct
  source 1..20: mol_type = other RNA
  modified_base 1..20: mod_base = OTHER; note = Phosphorothioate linkage
  modified_base 1..20: mod_base = OTHER; note = 2'-O-(2-methoxyethyl) ribonucleotide
  modified_base 2: mod_base = OTHER; note = 5-methyl cytidine
  modified_base 11: mod_base = OTHER; note = 5-methyl cytidine
tcttatttggcgttattaat

SEQ ID NO: 423 - RNA, 20 nt, synthetic construct
  source 1..20: mol_type = other RNA
  modified_base 1..20: mod_base = OTHER; note = Phosphorothioate linkage
  modified_base 1..20: mod_base = OTHER; note = 2'-O-(2-methoxyethyl) ribonucleotide
  modified_base 4: mod_base = OTHER; note = 5-methyl cytidine
  modified_base 13: mod_base = OTHER; note = 5-methyl cytidine
agtcttatttggcgttatta

SEQ ID NO: 424 - RNA, 20 nt, synthetic construct
  source 1..20: mol_type = other RNA
  modified_base 1..20: mod_base = OTHER; note = Phosphorothioate linkage
  modified_base 1..20: mod_base = OTHER; note = 2'-O-(2-methoxyethyl) ribonucleotide
  modified_base 6: mod_base = OTHER; note = 5-methyl cytidine
  modified_base 15: mod_base = OTHER; note = 5-methyl cytidine
ttagtcttatttggcgttat

SEQ ID NO: 425 - RNA, 20 nt, synthetic construct
  source 1..20: mol_type = other RNA
  modified_base 1..20: mod_base = OTHER; note = Phosphorothioate linkage
  modified_base 1..20: mod_base = OTHER; note = 2'-O-(2-methoxyethyl) ribonucleotide
  modified_base 8: mod_base = OTHER; note = 5-methyl cytidine
  modified_base 17: mod_base = OTHER; note = 5-methyl cytidine
aattagtcttatttggcgtt

SEQ ID NO: 426 - RNA, 20 nt, synthetic construct
  source 1..20: mol_type = other RNA
  modified_base 1..20: mod_base = OTHER; note = Phosphorothioate linkage
  modified_base 1..20: mod_base = OTHER; note = 2'-O-(2-methoxyethyl) ribonucleotide
  modified_base 11: mod_base = OTHER; note = 5-methyl cytidine
  modified_base 20: mod_base = OTHER; note = 5-methyl cytidine
tgtaattagtcttatttggc

SEQ ID NO: 427 - DNA, 20 bp, synthetic construct
  source 1..20: mol_type = other DNA
  modified_base 1..20: mod_base = OTHER; note = Phosphorothioate linkage
  modified_base 1..5: mod_base = OTHER; note = 2'-O-(2-methoxyethyl) ribonucleotide
  misc_feature 1..6: note = RNA
  modified_base 6: mod_base = OTHER; note = 2'-O-(2-methoxyethyl) ribonucleotide
  misc_feature 7..8: note = DNA
  misc_feature 9: note = RNA
  modified_base 9: mod_base = OTHER; note = 2'-O-(2-methoxyethyl) ribonucleotide
  misc_feature 10..11: note = DNA
  misc_feature 12: note = RNA
  modified_base 12: mod_base = OTHER; note = 2'-O-(2-methoxyethyl) ribonucleotide
  misc_feature 13..14: note = DNA
  misc_feature 15..20: note = RNA
  modified_base 15: mod_base = OTHER; note = 2'-O-(2-methoxyethyl) ribonucleotide
  modified_base 16..20: mod_base = OTHER; note = 2'-O-(2-methoxyethyl) ribonucleotide
  modified_base 7: mod_base = OTHER; note = 5-methyl cytidine
  modified_base 11: mod_base = OTHER; note = 5-methyl cytidine
  modified_base 16: mod_base = OTHER; note = 5-methyl cytidine
  modified_base 18: mod_base = OTHER; note = 5-methyl cytidine
gtggagcaaactaggcactg

SEQ ID NO: 428 - DNA, 20 bp, synthetic construct
  source 1..20: mol_type = other DNA
  modified_base 1..20: mod_base = OTHER; note = Phosphorothioate linkage
  modified_base 1..3: mod_base = OTHER; note = 2'-O-(2-methoxyethyl) ribonucleotide
  modified_base 4: mod_base = OTHER; note = Locked nucleic acid
  modified_base 5: mod_base = OTHER; note = 2'-O-(2-methoxyethyl) ribonucleotide
  misc_feature 1..5: note = RNA
  misc_feature 6..7: note = DNA
  misc_feature 8: note = RNA
  modified_base 8: mod_base = OTHER; note = Locked nucleic acid
  misc_feature 9..11: note = DNA
  misc_feature 12: note = RNA
  modified_base 12: mod_base = OTHER; note = Locked nucleic acid
  misc_feature 13..15: note = DNA
  misc_feature 16..20: note = RNA
  modified_base 15: mod_base = OTHER; note = Locked nucleic acid
  modified_base 17..20: mod_base = OTHER; note = 2'-O-(2-methoxyethyl) ribonucleotide
  modified_base 7: mod_base = OTHER; note = 5-methyl cytidine
  modified_base 11: mod_base = OTHER; note = 5-methyl cytidine
  modified_base 18: mod_base = OTHER; note = 5-methyl cytidine
gtggagcaaactaggcactg

SEQ ID NO: 429 - DNA, 20 bp, synthetic construct
  source 1..20: mol_type = other DNA
  modified_base 1..20: mod_base = OTHER; note = Phosphorothioate linkage
  modified_base 1..4: mod_base = OTHER; note = 2'-O-(2-methoxyethyl) ribonucleotide
  modified_base 5: mod_base = OTHER; note = Locked nucleic acid
  misc_feature 1..5: note = RNA
  misc_feature 6..8: note = DNA
  misc_feature 9: note = RNA
  modified_base 9: mod_base = OTHER; note = Locked nucleic acid
  misc_feature 10..12: note = DNA
  misc_feature 13: note = RNA
  modified_base 13: mod_base = OTHER; note = Locked nucleic acid
  misc_feature 14..15: note = DNA
  misc_feature 16..20: note = RNA
  modified_base 15: mod_base = OTHER; note = 2'-O-(2-methoxyethyl) ribonucleotide
  modified_base 16: mod_base = OTHER; note = Locked nucleic acid
  modified_base 18..20: mod_base = OTHER; note = 2'-O-(2-methoxyethyl) ribonucleotide
  modified_base 7: mod_base = OTHER; note = 5-methyl cytidine
  modified_base 11: mod_base = OTHER; note = 5-methyl cytidine
  modified_base 16: mod_base = OTHER; note = 5-methyl cytidine
  modified_base 18: mod_base = OTHER; note = 5-methyl cytidine
gtggagcaaactaggcactg

SEQ ID NO: 430 - RNA, 20 nt, synthetic construct
  source 1..20: mol_type = other RNA
  modified_base 1..20: mod_base = OTHER; note = Phosphorothioate linkage
  modified_base 1..3: mod_base = OTHER; note = 2'-O-(2-methoxyethyl) ribonucleotide
  modified_base 4: mod_base = OTHER; note = Locked nucleic acid
  modified_base 5: mod_base = OTHER; note = 2'-O-(2-methoxyethyl) ribonucleotide
  modified_base 6: mod_base = OTHER; note = Locked nucleic acid
  modified_base 7: mod_base = OTHER; note = 2'-O-(2-methoxyethyl) ribonucleotide
  modified_base 8: mod_base = OTHER; note = Locked nucleic acid
  modified_base 9: mod_base = OTHER; note = 2'-O-(2-methoxyethyl) ribonucleotide
  modified_base 10: mod_base = OTHER; note = Locked nucleic acid
  modified_base 11: mod_base = OTHER; note = 2'-O-(2-methoxyethyl) ribonucleotide
  modified_base 12: mod_base = OTHER; note = Locked nucleic acid
  modified_base 13: mod_base = OTHER; note = 2'-O-(2-methoxyethyl) ribonucleotide
  modified_base 14: mod_base = OTHER; note = Locked nucleic acid
  modified_base 15: mod_base = OTHER; note = 2'-O-(2-methoxyethyl) ribonucleotide
  modified_base 16: mod_base = OTHER; note = Locked nucleic acid
  modified_base 17: mod_base = OTHER; note = 2'-O-(2-methoxyethyl) ribonucleotide
  modified_base 18: mod_base = OTHER; note = Locked nucleic acid
  modified_base 19..20: mod_base = OTHER; note = 2'-O-(2-methoxyethyl) ribonucleotide
  modified_base 7: mod_base = OTHER; note = 5-methyl cytidine
  modified_base 11: mod_base = OTHER; note = 5-methyl cytidine
  modified_base 16: mod_base = OTHER; note = 5-methyl cytidine
  modified_base 18: mod_base = OTHER; note = 5-methyl cytidine
gtggagcaaactaggcactg

SEQ ID NO: 431 - RNA, 20 nt, synthetic construct
  source 1..20: mol_type = other RNA
  modified_base 1..20: mod_base = OTHER; note = Phosphorothioate linkage
  modified_base 1..2: mod_base = OTHER; note = 2'-O-(2-methoxyethyl) ribonucleotide
  modified_base 3: mod_base = OTHER; note = Locked nucleic acid
  modified_base 4: mod_base = OTHER; note = 2'-O-(2-methoxyethyl) ribonucleotide
  modified_base 5: mod_base = OTHER; note = Locked nucleic acid
  modified_base 6: mod_base = OTHER; note = 2'-O-(2-methoxyethyl) ribonucleotide
  modified_base 7: mod_base = OTHER; note = Locked nucleic acid
  modified_base 8: mod_base = OTHER; note = 2'-O-(2-methoxyethyl) ribonucleotide
  modified_base 9: mod_base = OTHER; note = Locked nucleic acid
  modified_base 10: mod_base = OTHER; note = 2'-O-(2-methoxyethyl) ribonucleotide
  modified_base 11: mod_base = OTHER; note = Locked nucleic acid
  modified_base 12: mod_base = OTHER; note = 2'-O-(2-methoxyethyl) ribonucleotide
  modified_base 13: mod_base = OTHER; note = Locked nucleic acid
  modified_base 14: mod_base = OTHER; note = 2'-O-(2-methoxyethyl) ribonucleotide
  modified_base 15: mod_base = OTHER; note = Locked nucleic acid
  modified_base 16: mod_base = OTHER; note = 2'-O-(2-methoxyethyl) ribonucleotide
  modified_base 17: mod_base = OTHER; note = Locked nucleic acid
  modified_base 18..20: mod_base = OTHER; note = 2'-O-(2-methoxyethyl) ribonucleotide
  modified_base 7: mod_base = OTHER; note = 5-methyl cytidine
  modified_base 11: mod_base = OTHER; note = 5-methyl cytidine
  modified_base 16: mod_base = OTHER; note = 5-methyl cytidine
  modified_base 18: mod_base = OTHER; note = 5-methyl cytidine
gtggagcaaactaggcactg

SEQ ID NO: 432 - RNA, 20 nt, synthetic construct
  source 1..20: mol_type = other RNA
  modified_base 1..20: mod_base = OTHER; note = Phosphorothioate linkage
  modified_base 1..2: mod_base = OTHER; note = 2'-O-(2-methoxyethyl) ribonucleotide
  modified_base 3: mod_base = OTHER; note = Locked nucleic acid
  modified_base 4..5: mod_base = OTHER; note = 2'-O-(2-methoxyethyl) ribonucleotide
  modified_base 6: mod_base = OTHER; note = Locked nucleic acid
  modified_base 7..8: mod_base = OTHER; note = 2'-O-(2-methoxyethyl) ribonucleotide
  modified_base 9: mod_base = OTHER; note = Locked nucleic acid
  modified_base 10..11: mod_base = OTHER; note = 2'-O-(2-methoxyethyl) ribonucleotide
  modified_base 12: mod_base = OTHER; note = Locked nucleic acid
  modified_base 13..14: mod_base = OTHER; note = 2'-O-(2-methoxyethyl) ribonucleotide
  modified_base 15: mod_base = OTHER; note = Locked nucleic acid
  modified_base 16..17: mod_base = OTHER; note = 2'-O-(2-methoxyethyl) ribonucleotide
  modified_base 18: mod_base = OTHER; note = Locked nucleic acid
  modified_base 19..20: mod_base = OTHER; note = 2'-O-(2-methoxyethyl) ribonucleotide
  modified_base 7: mod_base = OTHER; note = 5-methyl cytidine
  modified_base 11: mod_base = OTHER; note = 5-methyl cytidine
  modified_base 16: mod_base = OTHER; note = 5-methyl cytidine
  modified_base 18: mod_base = OTHER; note = 5-methyl cytidine
gtggagcaaactaggcactg

SEQ ID NO: 433 - RNA, 20 nt, synthetic construct
  source 1..20: mol_type = other RNA
  modified_base 1..20: mod_base = OTHER; note = Phosphorothioate linkage
  modified_base 1..4: mod_base = OTHER; note = 2'-O-(2-methoxyethyl) ribonucleotide
  modified_base 5: mod_base = OTHER; note = Locked nucleic acid
  modified_base 6..8: mod_base = OTHER; note = 2'-O-(2-methoxyethyl) ribonucleotide
  modified_base 9: mod_base = OTHER; note = Locked nucleic acid
  modified_base 10..12: mod_base = OTHER; note = 2'-O-(2-methoxyethyl) ribonucleotide
  modified_base 13: mod_base = OTHER; note = Locked nucleic acid
  modified_base 14..16: mod_base = OTHER; note = 2'-O-(2-methoxyethyl) ribonucleotide
  modified_base 17: mod_base = OTHER; note = Locked nucleic acid
  modified_base 18..20: mod_base = OTHER; note = 2'-O-(2-methoxyethyl) ribonucleotide
  modified_base 7: mod_base = OTHER; note = 5-methyl cytidine
  modified_base 11: mod_base = OTHER; note = 5-methyl cytidine
  modified_base 16: mod_base = OTHER; note = 5-methyl cytidine
  modified_base 18: mod_base = OTHER; note = 5-methyl cytidine
gtggagcaaactaggcactg

SEQ ID NO: 434 - RNA, 20 nt, synthetic construct
  source 1..20: mol_type = other RNA
  modified_base 1..20: mod_base = OTHER; note = Phosphorothioate linkage
  modified_base 1..3: mod_base = OTHER; note = 2'-O-(2-methoxyethyl) ribonucleotide
  modified_base 4: mod_base = OTHER; note = Locked nucleic acid
  modified_base 5..7: mod_base = OTHER; note = 2'-O-(2-methoxyethyl) ribonucleotide
  modified_base 8: mod_base = OTHER; note = Locked nucleic acid
  modified_base 9..11: mod_base = OTHER; note = 2'-O-(2-methoxyethyl) ribonucleotide
  modified_base 12: mod_base = OTHER; note = Locked nucleic acid
  modified_base 13..15: mod_base = OTHER; note = 2'-O-(2-methoxyethyl) ribonucleotide
  modified_base 16: mod_base = OTHER; note = Locked nucleic acid
  modified_base 17..20: mod_base = OTHER; note = 2'-O-(2-methoxyethyl) ribonucleotide
  modified_base 7: mod_base = OTHER; note = 5-methyl cytidine
  modified_base 11: mod_base = OTHER; note = 5-methyl cytidine
  modified_base 16: mod_base = OTHER; note = 5-methyl cytidine
  modified_base 18: mod_base = OTHER; note = 5-methyl cytidine
gtggagcaaactaggcactg

SEQ ID NO: 435 - RNA, 20 nt, synthetic construct
  source 1..20: mol_type = other RNA
  modified_base 1..20: mod_base = OTHER; note = Phosphorothioate linkage
  modified_base 1..5: mod_base = OTHER; note = 2'-O-(2-methoxyethyl) ribonucleotide
  modified_base 6: mod_base = OTHER; note = Locked nucleic acid
  modified_base 7..10: mod_base = OTHER; note = 2'-O-(2-methoxyethyl) ribonucleotide
  modified_base 11: mod_base = OTHER; note = Locked nucleic acid
  modified_base 12..15: mod_base = OTHER; note = 2'-O-(2-methoxyethyl) ribonucleotide
  modified_base 16: mod_base = OTHER; note = Locked nucleic acid
  modified_base 17..20: mod_base = OTHER; note = 2'-O-(2-methoxyethyl) ribonucleotide
  modified_base 7: mod_base = OTHER; note = 5-methyl cytidine
  modified_base 11: mod_base = OTHER; note = 5-methyl cytidine
  modified_base 16: mod_base = OTHER; note = 5-methyl cytidine
  modified_base 18: mod_base = OTHER; note = 5-methyl cytidine
gtggagcaaactaggcactg

SEQ ID NO: 436 - RNA, 20 nt, synthetic construct
  source 1..20: mol_type = other RNA
  modified_base 1..20: mod_base = OTHER; note = Phosphorothioate linkage
  modified_base 1..4: mod_base = OTHER; note = 2'-O-(2-methoxyethyl) ribonucleotide
  modified_base 5: mod_base = OTHER; note = Locked nucleic acid
  modified_base 6..9: mod_base = OTHER; note = 2'-O-(2-methoxyethyl) ribonucleotide
  modified_base 10: mod_base = OTHER; note = Locked nucleic acid
  modified_base 11..14: mod_base = OTHER; note = 2'-O-(2-methoxyethyl) ribonucleotide
  modified_base 15: mod_base = OTHER; note = Locked nucleic acid
  modified_base 16..20: mod_base = OTHER; note = 2'-O-(2-methoxyethyl) ribonucleotide
  modified_base 7: mod_base = OTHER; note = 5-methyl cytidine
  modified_base 11: mod_base = OTHER; note = 5-methyl cytidine
  modified_base 16: mod_base = OTHER; note = 5-methyl cytidine
  modified_base 18: mod_base = OTHER; note = 5-methyl cytidine
gtggagcaaactaggcactg

SEQ ID NO: 437 - DNA, 20 bp, synthetic construct
  source 1..20: mol_type = other DNA
  modified_base 1..20: mod_base = OTHER; note = Phosphorothioate linkage
  modified_base 1..5: mod_base = OTHER; note = 2'-O-(2-methoxyethyl) ribonucleotide
  modified_base 6: mod_base = OTHER; note = Locked nucleic acid
  misc_feature 1..6: note = RNA
  misc_feature 7..8: note = DNA
  misc_feature 9: note = RNA
  modified_base 9: mod_base = OTHER; note = Locked nucleic acid
  misc_feature 10..11: note = DNA
  misc_feature 12: note = RNA
  modified_base 12: mod_base = OTHER; note = Locked nucleic acid
  misc_feature 13..14: note = DNA
  misc_feature 15..20: note = RNA
  modified_base 15: mod_base = OTHER; note = Locked nucleic acid
  modified_base 16..20: mod_base = OTHER; note = 2'-O-(2-methoxyethyl) ribonucleotide
  modified_base 7: mod_base = OTHER; note = 5-methyl cytidine
  modified_base 11: mod_base = OTHER; note = 5-methyl cytidine
  modified_base 16: mod_base = OTHER; note = 5-methyl cytidine
  modified_base 18: mod_base = OTHER; note = 5-methyl cytidine
tggcgttattaattctacag

SEQ ID NO: 438 - DNA, 20 bp, synthetic construct
  source 1..20: mol_type = other DNA
  modified_base 1..20: mod_base = OTHER; note = Phosphorothioate linkage
  modified_base 1..3: mod_base = OTHER; note = 2'-O-(2-methoxyethyl) ribonucleotide
  modified_base 4: mod_base = OTHER; note = Locked nucleic acid
  modified_base 5: mod_base = OTHER; note = 2'-O-(2-methoxyethyl) ribonucleotide
  misc_feature 1..5: note = RNA
  misc_feature 6..7: note = DNA
  misc_feature 8: note = RNA
  modified_base 8: mod_base = OTHER; note = Locked nucleic acid
  misc_feature 9..11: note = DNA
  misc_feature 12: note = RNA
  modified_base 12: mod_base = OTHER; note = Locked nucleic acid
  misc_feature 13..15: note = DNA
  misc_feature 16..20: note = RNA
  modified_base 16: mod_base = OTHER; note = Locked nucleic acid
  modified_base 17..20: mod_base = OTHER; note = 2'-O-(2-methoxyethyl) ribonucleotide
  modified_base 4: mod_base = OTHER; note = 5-methyl cytidine
  modified_base 15: mod_base = OTHER; note = 5-methyl cytidine
  modified_base 18: mod_base = OTHER; note = 5-methyl cytidine
tggcgttattaattctacag

SEQ ID NO: 439 - DNA, 20 bp, synthetic construct
  source 1..20: mol_type = other DNA
  modified_base 1..20: mod_base = OTHER; note = Phosphorothioate linkage
  modified_base 1..4: mod_base = OTHER; note = 2'-O-(2-methoxyethyl) ribonucleotide
  modified_base 5: mod_base = OTHER; note = Locked nucleic acid
  misc_feature 1..5: note = RNA
  misc_feature 6..8: note = DNA
  misc_feature 9: note = RNA
  modified_base 9: mod_base = OTHER; note = Locked nucleic acid
  misc_feature 10..12: note = DNA
  misc_feature 13: note = RNA
  modified_base 13: mod_base = OTHER; note = Locked nucleic acid
  misc_feature 14..15: note = DNA
  misc_feature 16..20: note = RNA
  modified_base 16: mod_base = OTHER; note = 2'-O-(2-methoxyethyl) ribonucleotide
  modified_base 17: mod_base = OTHER; note = Locked nucleic acid
  modified_base 18..20: mod_base = OTHER; note = 2'-O-(2-methoxyethyl) ribonucleotide
  modified_base 4: mod_base = OTHER; note = 5-methyl cytidine
  modified_base 15: mod_base = OTHER; note = 5-methyl cytidine
  modified_base 18: mod_base = OTHER; note = 5-methyl cytidine
tggcgttattaattctacag

SEQ ID NO: 440 - RNA, 20 nt, synthetic construct
  source 1..20: mol_type = other RNA
  modified_base 1..20: mod_base = OTHER; note = Phosphorothioate linkage
  modified_base 1..3: mod_base = OTHER; note = 2'-O-(2-methoxyethyl) ribonucleotide
  modified_base 4: mod_base = OTHER; note = Locked nucleic acid
  modified_base 5: mod_base = OTHER; note = 2'-O-(2-methoxyethyl) ribonucleotide
  modified_base 6: mod_base = OTHER; note = Locked nucleic acid
  modified_base 7: mod_base = OTHER; note = 2'-O-(2-methoxyethyl) ribonucleotide
  modified_base 8: mod_base = OTHER; note = Locked nucleic acid
  modified_base 9: mod_base = OTHER; note = 2'-O-(2-methoxyethyl) ribonucleotide
  modified_base 10: mod_base = OTHER; note = Locked nucleic acid
  modified_base 11: mod_base = OTHER; note = 2'-O-(2-methoxyethyl) ribonucleotide
  modified_base 12: mod_base = OTHER; note = Locked nucleic acid
  modified_base 13: mod_base = OTHER; note = 2'-O-(2-methoxyethyl) ribonucleotide
  modified_base 14: mod_base = OTHER; note = Locked nucleic acid
  modified_base 15: mod_base = OTHER; note = 2'-O-(2-methoxyethyl) ribonucleotide
  modified_base 16: mod_base = OTHER; note = Locked nucleic acid
  modified_base 17: mod_base = OTHER; note = 2'-O-(2-methoxyethyl) ribonucleotide
  modified_base 18: mod_base = OTHER; note = Locked nucleic acid
  modified_base 19..20: mod_base = OTHER; note = 2'-O-(2-methoxyethyl) ribonucleotide
  modified_base 4: mod_base = OTHER; note = 5-methyl cytidine
  modified_base 15: mod_base = OTHER; note = 5-methyl cytidine
  modified_base 18: mod_base = OTHER; note = 5-methyl cytidine
tggcgttattaattctacag

SEQ ID NO: 441 - RNA, 20 nt, synthetic construct
  source 1..20: mol_type = other RNA
  modified_base 1..20: mod_base = OTHER; note = Phosphorothioate linkage
  modified_base 1..2: mod_base = OTHER; note = 2'-O-(2-methoxyethyl) ribonucleotide
  modified_base 3: mod_base = OTHER; note = Locked nucleic acid
  modified_base 4: mod_base = OTHER; note = 2'-O-(2-methoxyethyl) ribonucleotide
  modified_base 5: mod_base = OTHER; note = Locked nucleic acid
  modified_base 6: mod_base = OTHER; note = 2'-O-(2-methoxyethyl) ribonucleotide
  modified_base 7: mod_base = OTHER; note = Locked nucleic acid
  modified_base 8: mod_base = OTHER; note = 2'-O-(2-methoxyethyl) ribonucleotide
  modified_base 9: mod_base = OTHER; note = Locked nucleic acid
  modified_base 10: mod_base = OTHER; note = 2'-O-(2-methoxyethyl) ribonucleotide
  modified_base 11: mod_base = OTHER; note = Locked nucleic acid
  modified_base 12: mod_base = OTHER; note = 2'-O-(2-methoxyethyl) ribonucleotide
  modified_base 13: mod_base = OTHER; note = Locked nucleic acid
  modified_base 14: mod_base = OTHER; note = 2'-O-(2-methoxyethyl) ribonucleotide
  modified_base 15: mod_base = OTHER; note = Locked nucleic acid
  modified_base 16: mod_base = OTHER; note = 2'-O-(2-methoxyethyl) ribonucleotide
  modified_base 17: mod_base = OTHER; note = Locked nucleic acid
  modified_base 18..20: mod_base = OTHER; note = 2'-O-(2-methoxyethyl) ribonucleotide
  modified_base 4: mod_base = OTHER; note = 5-methyl cytidine
  modified_base 15: mod_base = OTHER; note = 5-methyl cytidine
  modified_base 18: mod_base = OTHER; note = 5-methyl cytidine
tggcgttattaattctacag

SEQ ID NO: 442 - RNA, 20 nt, synthetic construct
  source 1..20: mol_type = other RNA
  modified_base 1..20: mod_base = OTHER; note = Phosphorothioate linkage
  modified_base 1..2: mod_base = OTHER; note = 2'-O-(2-methoxyethyl) ribonucleotide
  modified_base 3: mod_base = OTHER; note = Locked nucleic acid
  modified_base 4..5: mod_base = OTHER; note = 2'-O-(2-methoxyethyl) ribonucleotide
  modified_base 6: mod_base = OTHER; note = Locked nucleic acid
  modified_base 7..8: mod_base = OTHER; note = 2'-O-(2-methoxyethyl) ribonucleotide
  modified_base 9: mod_base = OTHER; note = Locked nucleic acid
  modified_base 10..11: mod_base = OTHER; note = 2'-O-(2-methoxyethyl) ribonucleotide
  modified_base 12: mod_base = OTHER; note = Locked nucleic acid
  modified_base 13..14: mod_base = OTHER; note = 2'-O-(2-methoxyethyl) ribonucleotide
  modified_base 15: mod_base = OTHER; note = Locked nucleic acid
  modified_base 16..17: mod_base = OTHER; note = 2'-O-(2-methoxyethyl) ribonucleotide
  modified_base 18: mod_base = OTHER; note = Locked nucleic acid
  modified_base 19..20: mod_base = OTHER; note = 2'-O-(2-methoxyethyl) ribonucleotide
  modified_base 4: mod_base = OTHER; note = 5-methyl cytidine
  modified_base 15: mod_base = OTHER; note = 5-methyl cytidine
  modified_base 18: mod_base = OTHER; note = 5-methyl cytidine
tggcgttattaattctacag

SEQ ID NO: 443 - RNA, 20 nt, synthetic construct
  source 1..20: mol_type = other RNA
  modified_base 1..20: mod_base = OTHER; note = Phosphorothioate linkage
  modified_base 1..4: mod_base = OTHER; note = 2'-O-(2-methoxyethyl) ribonucleotide
  modified_base 5: mod_base = OTHER; note = Locked nucleic acid
  modified_base 6..8: mod_base = OTHER; note = 2'-O-(2-methoxyethyl) ribonucleotide
  modified_base 9: mod_base = OTHER; note = Locked nucleic acid
  modified_base 10..12: mod_base = OTHER; note = 2'-O-(2-methoxyethyl) ribonucleotide
  modified_base 13: mod_base = OTHER; note = Locked nucleic acid
  modified_base 14..16: mod_base = OTHER; note = 2'-O-(2-methoxyethyl) ribonucleotide
  modified_base 17: mod_base = OTHER; note = Locked nucleic acid
  modified_base 18..20: mod_base = OTHER; note = 2'-O-(2-methoxyethyl) ribonucleotide
  modified_base 4: mod_base = OTHER; note = 5-methyl cytidine
  modified_base 15: mod_base = OTHER; note = 5-methyl cytidine
  modified_base 16: mod_base = OTHER; note = 5-methyl cytidine
tggcgttattaattctacag

SEQ ID NO: 444 - RNA, 20 nt, synthetic construct
  source 1..20: mol_type = other RNA
  modified_base 1..20: mod_base = OTHER; note = Phosphorothioate linkage
  modified_base 1..3: mod_base = OTHER; note = 2'-O-(2-methoxyethyl) ribonucleotide
  modified_base 4: mod_base = OTHER; note = Locked nucleic acid
  modified_base 5..7: mod_base = OTHER; note = 2'-O-(2-methoxyethyl) ribonucleotide
  modified_base 8: mod_base = OTHER; note = Locked nucleic acid
  modified_base 9..11: mod_base = OTHER; note = 2'-O-(2-methoxyethyl) ribonucleotide
  modified_base 12: mod_base = OTHER; note = Locked nucleic acid
  modified_base 13..15: mod_base = OTHER; note = 2'-O-(2-methoxyethyl) ribonucleotide
  modified_base 16: mod_base = OTHER; note = Locked nucleic acid
  modified_base 17..20: mod_base = OTHER; note = 2'-O-(2-methoxyethyl) ribonucleotide
  modified_base 10: mod_base = OTHER; note = 5-methyl cytidine
  modified_base 15: mod_base = OTHER; note = 5-methyl cytidine
  modified_base 18: mod_base = OTHER; note = 5-methyl cytidine
tggcgttattaattctacag

SEQ ID NO: 445 - RNA, 20 nt, synthetic construct
  source 1..20: mol_type = other RNA
  modified_base 1..20: mod_base = OTHER; note = Phosphorothioate linkage
  modified_base 1..5: mod_base = OTHER; note = 2'-O-(2-methoxyethyl) ribonucleotide
  modified_base 6: mod_base = OTHER; note = Locked nucleic acid
  modified_base 7..10: mod_base = OTHER; note = 2'-O-(2-methoxyethyl) ribonucleotide
  modified_base 11: mod_base = OTHER; note = Locked nucleic acid
  modified_base 12..15: mod_base = OTHER; note = 2'-O-(2-methoxyethyl) ribonucleotide
  modified_base 16: mod_base = OTHER; note = Locked nucleic acid
  modified_base 17..20: mod_base = OTHER; note = 2'-O-(2-methoxyethyl) ribonucleotide
  modified_base 4: mod_base = OTHER; note = 5-methyl cytidine
  modified_base 15: mod_base = OTHER; note = 5-methyl cytidine
  modified_base 18: mod_base = OTHER; note = 5-methyl cytidine
tggcgttattaattctacag

SEQ ID NO: 446 - RNA, 20 nt, synthetic construct
  source 1..20: mol_type = other RNA
  modified_base 1..20: mod_base = OTHER; note = Phosphorothioate linkage
  modified_base 1..4: mod_base = OTHER; note = 2'-O-(2-methoxyethyl) ribonucleotide
  modified_base 5: mod_base = OTHER; note = Locked nucleic acid
  modified_base 6..9: mod_base = OTHER; note = 2'-O-(2-methoxyethyl) ribonucleotide
  modified_base 10: mod_base = OTHER; note = Locked nucleic acid
  modified_base 11..14: mod_base = OTHER; note = 2'-O-(2-methoxyethyl) ribonucleotide
  modified_base 15: mod_base = OTHER; note = Locked nucleic acid
  modified_base 16..20: mod_base = OTHER; note = 2'-O-(2-methoxyethyl) ribonucleotide
  modified_base 4: mod_base = OTHER; note = 5-methyl cytidine
  modified_base 15: mod_base = OTHER; note = 5-methyl cytidine
  modified_base 18: mod_base = OTHER; note = 5-methyl cytidine
tggcgttattaattctacag

SEQ ID NO: 447 - DNA, 22 bp, synthetic construct
  source 1..22: mol_type = other DNA
  modified_base 1..22: mod_base = OTHER; note = Phosphorothioate linkage
  modified_base 1..6: mod_base = OTHER; note = 2'-O-(2-methoxyethyl) ribonucleotide
  misc_feature 1..6: note = RNA
  misc_feature 7..16: note = DNA
  misc_feature 17..22: note = RNA
  modified_base 17..22: mod_base = OTHER; note = 2'-O-(2-methoxyethyl) ribonucleotide
  modified_base 8: mod_base = OTHER; note = 5-methyl cytidine
  modified_base 12: mod_base = OTHER; note = 5-methyl cytidine
  modified_base 17: mod_base = OTHER; note = 5-methyl cytidine
  modified_base 19: mod_base = OTHER; note = 5-methyl cytidine
ggtggagcaaactaggcactga

SEQ ID NO: 448 - RNA, 22 nt, synthetic construct
  source 1..22: mol_type = other RNA
  modified_base 1..22: mod_base = OTHER; note = Phosphorothioate linkage
  modified_base 1..22: mod_base = OTHER; note = 2'-O-(2-methoxyethyl) ribonucleotide
  modified_base 8: mod_base = OTHER; note = 5-methyl cytidine
  modified_base 12: mod_base = OTHER; note = 5-methyl cytidine
  modified_base 17: mod_base = OTHER; note = 5-methyl cytidine
  modified_base 19: mod_base = OTHER; note = 5-methyl cytidine
ggtggagcaaactaggcactga

SEQ ID NO: 449 - DNA, 22 bp, synthetic construct
  source 1..22: mol_type = other DNA
  modified_base 1..22: mod_base = OTHER; note = Phosphorothioate linkage
  modified_base 1..5: mod_base = OTHER; note = 2'-O-(2-methoxyethyl) ribonucleotide
  misc_feature 1..5: note = RNA
  misc_feature 6..8: note = DNA
  misc_feature 9: note = RNA
  modified_base 9: mod_base = OTHER; note = 2'-O-(2-methoxyethyl) ribonucleotide
  misc_feature 10..13: note = DNA
  misc_feature 14: note = RNA
  modified_base 14: mod_base = OTHER; note = 2'-O-(2-methoxyethyl) ribonucleotide
  misc_feature 15..17: note = DNA
  misc_feature 18..22: note = RNA
  modified_base 18..22: mod_base = OTHER; note = 2'-O-(2-methoxyethyl) ribonucleotide
  modified_base 8: mod_base = OTHER; note = 5-methyl cytidine
  modified_base 12: mod_base = OTHER; note = 5-methyl cytidine
  modified_base 17: mod_base = OTHER; note = 5-methyl cytidine
  modified_base 19: mod_base = OTHER; note = 5-methyl cytidine
ggtggagcaaactaggcactga

SEQ ID NO: 450 - DNA, 22 bp, synthetic construct
  source 1..22: mol_type = other DNA
  modified_base 1..22: mod_base = OTHER; note = Phosphorothioate linkage
  modified_base 1..5: mod_base = OTHER; note = 2'-O-(2-methoxyethyl) ribonucleotide
  modified_base 6: mod_base = OTHER; note = Locked nucleic acid
  misc_feature 1..6: note = RNA
  misc_feature 7..8: note = DNA
  misc_feature 9: note = RNA
  modified_base 9: mod_base = OTHER; note = Locked nucleic acid
  misc_feature 10..13: note = DNA
  misc_feature 14: note = RNA
  modified_base 14: mod_base = OTHER; note = Locked nucleic acid
  misc_feature 15..16: note = DNA
  misc_feature 17..22: note = RNA
  modified_base 17: mod_base = OTHER; note = Locked nucleic acid
  modified_base 18..22: mod_base = OTHER; note = 2'-O-(2-methoxyethyl) ribonucleotide
  modified_base 8: mod_base = OTHER; note = 5-methyl cytidine
  modified_base 12: mod_base = OTHER; note = 5-methyl cytidine
  modified_base 17: mod_base = OTHER; note = 5-methyl cytidine
  modified_base 19: mod_base = OTHER; note = 5-methyl cytidine
ggtggagcaaactaggcactga

SEQ ID NO: 451 - DNA, 24 bp, synthetic construct
  source 1..24: mol_type = other DNA
  modified_base 1..24: mod_base = OTHER; note = Phosphorothioate linkage
  modified_base 1..7: mod_base = OTHER; note = 2'-O-(2-methoxyethyl) ribonucleotide
  misc_feature 1..7: note = RNA
  misc_feature 8..17: note = DNA
  misc_feature 18..24: note = RNA
  modified_base 18..24: mod_base = OTHER; note = 2'-O-(2-methoxyethyl) ribonucleotide
  modified_base 9: mod_base = OTHER; note = 5-methyl cytidine
  modified_base 13: mod_base = OTHER; note = 5-methyl cytidine
  modified_base 18: mod_base = OTHER; note = 5-methyl cytidine
  modified_base 20: mod_base = OTHER; note = 5-methyl cytidine
aggtggagcaaactaggcactgag

SEQ ID NO: 452 - RNA, 24 nt, synthetic construct
  source 1..24: mol_type = other RNA
  modified_base 1..24: mod_base = OTHER; note = Phosphorothioate linkage
  modified_base 1..24: mod_base = OTHER; note = 2'-O-(2-methoxyethyl) ribonucleotide
  modified_base 9: mod_base = OTHER; note = 5-methyl cytidine
  modified_base 13: mod_base = OTHER; note = 5-methyl cytidine
  modified_base 18: mod_base = OTHER; note = 5-methyl cytidine
  modified_base 20: mod_base = OTHER; note = 5-methyl cytidine
aggtggagcaaactaggcactgag

SEQ ID NO: 453 - DNA, 24 bp, synthetic construct
  source 1..24: mol_type = other DNA
  modified_base 1..24: mod_base = OTHER; note = Phosphorothioate linkage
  modified_base 1..5: mod_base = OTHER; note = 2'-O-(2-methoxyethyl) ribonucleotide
  misc_feature 1..5: note = RNA
  misc_feature 6..7: note = DNA
  misc_feature 8: note = RNA
  modified_base 8: mod_base = OTHER; note = 2'-O-(2-methoxyethyl) ribonucleotide
  misc_feature 9..10: note = DNA
  misc_feature 11: note = RNA
  modified_base 11: mod_base = OTHER; note = 2'-O-(2-methoxyethyl) ribonucleotide
  misc_feature 12..13: note = DNA
  misc_feature 14: note = RNA
  modified_base 14: mod_base = OTHER; note = 2'-O-(2-methoxyethyl) ribonucleotide
  misc_feature 15..16: note = DNA
  misc_feature 17: note = RNA
  modified_base 17: mod_base = OTHER; note = 2'-O-(2-methoxyethyl) ribonucleotide
  misc_feature 18..19: note = DNA
  misc_feature 20..24: note = RNA
  modified_base 20..24: mod_base = OTHER; note = 2'-O-(2-methoxyethyl) ribonucleotide
  modified_base 10: mod_base = OTHER; note = 5-methyl cytidine
  modified_base 13: mod_base = OTHER; note = 5-methyl cytidine
  modified_base 18: mod_base = OTHER; note = 5-methyl cytidine
  modified_base 20: mod_base = OTHER; note = 5-methyl cytidine
aggtggagcaaactaggcactgag

SEQ ID NO: 454 - DNA, 24 bp, synthetic construct
  source 1..24: mol_type = other DNA
  modified_base 1..24: mod_base = OTHER; note = Phosphorothioate linkage
  modified_base 1..5: mod_base = OTHER; note = 2'-O-(2-methoxyethyl) ribonucleotide
  misc_feature 1..5: note = RNA
  misc_feature 6..7: note = DNA
  misc_feature 8: note = RNA
  modified_base 8: mod_base = OTHER; note = Locked nucleic acid
  misc_feature 9..10: note = DNA
  misc_feature 11: note = RNA
  modified_base 11: mod_base = OTHER; note = Locked nucleic acid
  misc_feature 12..13: note = DNA
  misc_feature 14: note = RNA
  modified_base 14: mod_base = OTHER; note = Locked nucleic acid
  misc_feature 15..16: note = DNA
  misc_feature 17: note = RNA
  modified_base 17: mod_base = OTHER; note = Locked nucleic acid
  misc_feature 18..19: note = DNA
  misc_feature 20..24: note = RNA
  modified_base 9: mod_base = OTHER; note = 5-methyl cytidine
  modified_base 13: mod_base = OTHER; note = 5-methyl cytidine
  modified_base 18: mod_base = OTHER; note = 5-methyl cytidine
  modified_base 20: mod_base = OTHER; note = 5-methyl cytidine
aggtggagcaaactaggcactgag

SEQ ID NO: 455 - DNA, 22 bp, synthetic construct
  source 1..22: mol_type = other DNA
  modified_base 1..22: mod_base = OTHER; note = Phosphorothioate linkage
  modified_base 1..6: mod_base = OTHER; note = 2'-O-(2-methoxyethyl) ribonucleotide
  misc_feature 1..6: note = RNA
  misc_feature 7..16: note = DNA
  misc_feature 17..22: note = RNA
  modified_base 17..22: mod_base = OTHER; note = 2'-O-(2-methoxyethyl) ribonucleotide
  modified_base 5: mod_base = OTHER; note = 5-methyl cytidine
  modified_base 16: mod_base = OTHER; note = 5-methyl cytidine
  modified_base 19: mod_base = OTHER; note = 5-methyl cytidine
ttggcgttattaattctacaga

SEQ ID NO: 456 - RNA, 22 nt, synthetic construct
  source 1..22: mol_type = other RNA
  modified_base 1..22: mod_base = OTHER; note = Phosphorothioate linkage
  modified_base 1..22: mod_base = OTHER; note = 2'-O-(2-methoxyethyl) ribonucleotide
  modified_base 5: mod_base = OTHER; note = 5-methyl cytidine
  modified_base 16: mod_base = OTHER; note = 5-methyl cytidine
  modified_base 19: mod_base = OTHER; note = 5-methyl cytidine
ttggcgttattaattctacaga

SEQ ID NO: 457 - DNA, 22 bp, synthetic construct
  source 1..22: mol_type = other DNA
  modified_base 1..22: mod_base = OTHER; note = Phosphorothioate linkage
  modified_base 1..5: mod_base = OTHER; note = 2'-O-(2-methoxyethyl) ribonucleotide
  misc_feature 1..5: note = RNA
  misc_feature 6..8: note = DNA
  misc_feature 9: note = RNA
  modified_base 9: mod_base = OTHER; note = 2'-O-(2-methoxyethyl) ribonucleotide
  misc_feature 10..13: note = DNA
  misc_feature 14: note = RNA
  modified_base 14: mod_base = OTHER; note = 2'-O-(2-methoxyethyl) ribonucleotide
  misc_feature 15..17: note = DNA
  misc_feature 18..22: note = RNA
  modified_base 18..22: mod_base = OTHER; note = 2'-O-(2-methoxyethyl) ribonucleotide
  modified_base 5: mod_base = OTHER; note = 5-methyl cytidine
  modified_base 16: mod_base = OTHER; note = 5-methyl cytidine
  modified_base 19: mod_base = OTHER; note = 5-methyl cytidine
ttggcgttattaattctacaga

SEQ ID NO: 458 - DNA, 22 bp, synthetic construct
  source 1..22: mol_type = other DNA
  modified_base 1..22: mod_base = OTHER; note = Phosphorothioate linkage
  modified_base 1..5: mod_base = OTHER; note = 2'-O-(2-methoxyethyl) ribonucleotide
  misc_feature 1..6: note = RNA
  modified_base 6: mod_base = OTHER; note = Locked nucleic acid
  misc_feature 7..8: note = DNA
  misc_feature 9: note = RNA
  modified_base 9: mod_base = OTHER; note = Locked nucleic acid
  misc_feature 10..13: note = DNA
  misc_feature 14: note = RNA
  modified_base 14: mod_base = OTHER; note = Locked nucleic acid
  misc_feature 15..16: note = DNA
  misc_feature 17..22: note = RNA
  modified_base 17: mod_base = OTHER; note = Locked nucleic acid
  modified_base 18..22: mod_base = OTHER; note = 2'-O-(2-methoxyethyl) ribonucleotide
  modified_base 5: mod_base = OTHER; note = 5-methyl cytidine
  modified_base 16: mod_base = OTHER; note = 5-methyl cytidine
  modified_base 19: mod_base = OTHER; note = 5-methyl cytidine
ttggcgttattaattctacaga

SEQ ID NO: 459 - DNA, 24 bp, synthetic construct
  source 1..24: mol_type = other DNA
  modified_base 1..24: mod_base = OTHER; note = Phosphorothioate linkage
  modified_base 1..7: mod_base = OTHER; note = 2'-O-(2-methoxyethyl) ribonucleotide
  misc_feature 1..7: note = RNA
  misc_feature 8..17: note = DNA
  misc_feature 18..24: note = RNA
  modified_base 18..24: mod_base = OTHER; note = 2'-O-(2-methoxyethyl) ribonucleotide
  modified_base 6: mod_base = OTHER; note = 5-methyl cytidine
  modified_base 17: mod_base = OTHER; note = 5-methyl cytidine
  modified_base 20: mod_base = OTHER; note = 5-methyl cytidine
tttggcgttattaattctacagag

SEQ ID NO: 460 - RNA, 24 nt, synthetic construct
  source 1..24: mol_type = other RNA
  modified_base 1..24: mod_base = OTHER; note = Phosphorothioate linkage
  modified_base 1..24: mod_base = OTHER; note = 2'-O-(2-methoxyethyl) ribonucleotide
  modified_base 6: mod_base = OTHER; note = 5-methyl cytidine
  modified_base 17: mod_base = OTHER; note = 5-methyl cytidine
  modified_base 20: mod_base = OTHER; note = 5-methyl cytidine
tttggcgttattaattctacagag

SEQ ID NO: 461 - DNA, 24 bp, synthetic construct
  source 1..24: mol_type = other DNA
  modified_base 1..24: mod_base = OTHER; note = Phosphorothioate linkage
  modified_base 1..5: mod_base = OTHER; note = 2'-O-(2-methoxyethyl) ribonucleotide
  misc_feature 1..5: note = RNA
  misc_feature 6..7: note = DNA
  misc_feature 8: note = RNA
  modified_base 8: mod_base = OTHER; note = 2'-O-(2-methoxyethyl) ribonucleotide
  misc_feature 9..10: note = DNA
  misc_feature 11: note = RNA
  modified_base 11: mod_base = OTHER; note = 2'-O-(2-methoxyethyl) ribonucleotide
  misc_feature 12..13: note = DNA
  misc_feature 14: note = RNA
  modified_base 14: mod_base = OTHER; note = 2'-O-(2-methoxyethyl) ribonucleotide
  misc_feature 15..16: note = DNA
  misc_feature 17: note = RNA
  modified_base 17: mod_base = OTHER; note = 2'-O-(2-methoxyethyl) ribonucleotide
  misc_feature 18..19: note = DNA
  misc_feature 20..24: note = RNA
  modified_base 20..24: mod_base = OTHER; note = 2'-O-(2-methoxyethyl) ribonucleotide
  modified_base 6: mod_base = OTHER; note = 5-methyl cytidine
  modified_base 17: mod_base = OTHER; note = 5-methyl cytidine
  modified_base 20: mod_base = OTHER; note = 5-methyl cytidine
tttggcgttattaattctacagag

SEQ ID NO: 462 - DNA, 24 bp, synthetic construct
  source 1..24: mol_type = other DNA
  modified_base 1..24: mod_base = OTHER; note = Phosphorothioate linkage
  modified_base 1..5: mod_base = OTHER; note = 2'-O-(2-methoxyethyl) ribonucleotide
  misc_feature 1..5: note = RNA
  misc_feature 6..7: note = DNA
  misc_feature 8: note = RNA
  modified_base 8: mod_base = OTHER; note = Locked nucleic acid
  misc_feature 9..10: note = DNA
  misc_feature 11: note = RNA
  modified_base 11: mod_base = OTHER; note = Locked nucleic acid
  misc_feature 12..13: note = DNA
  misc_feature 14: note = RNA
  modified_base 14: mod_base = OTHER; note = Locked nucleic acid
  misc_feature 15..16: note = DNA
  misc_feature 17: note = RNA
  modified_base 17: mod_base = OTHER; note = Locked nucleic acid
  misc_feature 18..19: note = DNA
  misc_feature 20..24: note = RNA
  modified_base 20..24: mod_base = OTHER; note = Locked nucleic acid
  modified_base 6: mod_base = OTHER; note = 5-methyl cytidine
  modified_base 17: mod_base = OTHER; note = 5-methyl cytidine
  modified_base 20: mod_base = OTHER; note = 5-methyl cytidine
tttggcgttattaattctacagag

SEQ ID NO: 463 - RNA, 20 nt, synthetic construct
  source 1..20: mol_type = other RNA
  modified_base 1..20: mod_base = OTHER; note = Phosphorothioate linkage
  modified_base 1..20: mod_base = OTHER; note = 2'-O-(2-methoxyethyl) ribonucleotide
  modified_base 8: mod_base = OTHER; note = 5-methyl cytidine
  modified_base 14: mod_base = OTHER; note = 5-methyl cytidine
tgttttgcttggtcaagagg

SEQ ID NO: 464 - RNA, 20 nt, synthetic construct
  source 1..20: mol_type = other RNA
  modified_base 1..20: mod_base = OTHER; note = Phosphorothioate linkage
  modified_base 1..20: mod_base = OTHER; note = 2'-O-(2-methoxyethyl) ribonucleotide
  modified_base 4: mod_base = OTHER; note = 5-methyl cytidine
  modified_base 15: mod_base = OTHER; note = 5-methyl cytidine
  modified_base 18: mod_base = OTHER; note = 5-methyl cytidine
tggcgttattaattctacag

SEQ ID NO: 465 - RNA, 20 nt, synthetic construct
  source 1..20: mol_type = other RNA
  modified_base 1..20: mod_base = OTHER; note = Phosphorothioate linkage
  modified_base 1..20: mod_base = OTHER; note = 2'-O-(2-methoxyethyl) ribonucleotide
  modified_base 2..3: mod_base = OTHER; note = 5-methyl cytidine
  modified_base 8..9: mod_base = OTHER; note = 5-methyl cytidine
  modified_base 12..13: mod_base = OTHER; note = 5-methyl cytidine
  modified_base 15: mod_base = OTHER; note = 5-methyl cytidine
accttttccaacctcggttt

SEQ ID NO: 466 - RNA, 20 nt, synthetic construct
  source 1..20: mol_type = other RNA
  modified_base 1..20: mod_base = OTHER; note = Phosphorothioate linkage
  modified_base 1..20: mod_base = OTHER; note = 2'-O-(2-methoxyethyl) ribonucleotide
  modified_base 15: mod_base = OTHER; note = 5-methyl cytidine
  modified_base 18: mod_base = OTHER; note = 5-methyl cytidine
tggtgttattaattctacag

SEQ ID NO: 467 - RNA, 20 nt, synthetic construct
  source 1..20: mol_type = other RNA
  modified_base 1..3: mod_base = OTHER; note = Phosphorothioate linkage
  modified_base 4..6: mod_base = OTHER; note = Phosphorothioate linkage
  modified_base 7..9: mod_base = OTHER; note = Phosphorothioate linkage
  modified_base 10..12: mod_base = OTHER; note = Phosphorothioate linkage
  modified_base 13..15: mod_base = OTHER; note = Phosphorothioate linkage
  modified_base 16..18: mod_base = OTHER; note = Phosphorothioate linkage
  modified_base 19..20: mod_base = OTHER; note = Phosphorothioate linkage
  modified_base 1..20: mod_base = OTHER; note = 2'-O-(2-methoxyethyl) ribonucleotide
  modified_base 8: mod_base = OTHER; note = 5-methyl cytidine
  modified_base 14: mod_base = OTHER; note = 5-methyl cytidine
tgttttgcttggtcaagagg

SEQ ID NO: 468 - RNA, 20 nt, synthetic construct
  source 1..20: mol_type = other RNA
  modified_base 1..3: mod_base = OTHER; note = Phosphorothioate linkage
  modified_base 4..5: mod_base = OTHER; note = Phosphorothioate linkage
  modified_base 6..7: mod_base = OTHER; note = Phosphorothioate linkage
  modified_base 8..9: mod_base = OTHER; note = Phosphorothioate linkage
  modified_base 10..11: mod_base = OTHER; note = Phosphorothioate linkage
  modified_base 12..13: mod_base = OTHER; note = Phosphorothioate linkage
  modified_base 14..15: mod_base = OTHER; note = Phosphorothioate linkage
  modified_base 16..17: mod_base = OTHER; note = Phosphorothioate linkage
  modified_base 18..20: mod_base = OTHER; note = Phosphorothioate linkage
  modified_base 1..20: mod_base = OTHER; note = 2'-O-(2-methoxyethyl) ribonucleotide
  modified_base 8: mod_base = OTHER; note = 5-methyl cytidine
  modified_base 14: mod_base = OTHER; note = 5-methyl cytidine
tgttttgcttggtcaagagg

SEQ ID NO: 469 - RNA, 20 nt, synthetic construct
  source 1..20: mol_type = other RNA
  modified_base 1..5: mod_base = OTHER; note = Phosphorothioate linkage
  modified_base 7..14: mod_base = OTHER; note = Phosphorothioate linkage
  modified_base 16..20: mod_base = OTHER; note = Phosphorothioate linkage
  modified_base 1..20: mod_base = OTHER; note = 2'-O-(2-methoxyethyl) ribonucleotide
  modified_base 8: mod_base = OTHER; note = 5-methyl cytidine
  modified_base 14: mod_base = OTHER; note = 5-methyl cytidine
tgttttgcttggtcaagagg

SEQ ID NO: 470 - RNA, 20 nt, synthetic construct
  source 1..20: mol_type = other RNA
  modified_base 1..4: mod_base = OTHER; note = Phosphorothioate linkage
  modified_base 7..14: mod_base = OTHER; note = Phosphorothioate linkage
  modified_base 17..20: mod_base = OTHER; note = Phosphorothioate linkage
  modified_base 1..20: mod_base = OTHER; note = 2'-O-(2-methoxyethyl) ribonucleotide
  modified_base 8: mod_base = OTHER; note = 5-methyl cytidine
  modified_base 14: mod_base = OTHER; note = 5-methyl cytidine
tgttttgcttggtcaagagg

SEQ ID NO: 471 - RNA, 20 nt, synthetic construct
  source 1..20: mol_type = other RNA
  modified_base 1..3: mod_base = OTHER; note = Phosphorothioate linkage
  modified_base 7..14: mod_base = OTHER; note = Phosphorothioate linkage
  modified_base 18..20: mod_base = OTHER; note = Phosphorothioate linkage
  modified_base 1..20: mod_base = OTHER; note = 2'-O-(2-methoxyethyl) ribonucleotide
  modified_base 8: mod_base = OTHER; note = 5-methyl cytidine
  modified_base 14: mod_base = OTHER; note = 5-methyl cytidine
tgttttgcttggtcaagagg

SEQ ID NO: 472 - RNA, 20 nt, synthetic construct
  source 1..20: mol_type = other RNA
  modified_base 1..2: mod_base = OTHER; note = Phosphorothioate linkage
  modified_base 7..14: mod_base = OTHER; note = Phosphorothioate linkage
  modified_base 19..20: mod_base = OTHER; note = Phosphorothioate linkage
  modified_base 1..20: mod_base = OTHER; note = 2'-O-(2-methoxyethyl) ribonucleotide
  modified_base 8: mod_base = OTHER; note = 5-methyl cytidine
  modified_base 14: mod_base = OTHER; note = 5-methyl cytidine
tgttttgcttggtcaagagg

SEQ ID NO: 473 - RNA, 20 nt, synthetic construct
  source 1..20: mol_type = other RNA
  modified_base 1..3: mod_base = OTHER; note = Phosphorothioate linkage
  modified_base 4..8: mod_base = OTHER; note = Phosphorothioate linkage
  modified_base 9..13: mod_base = OTHER; note = Phosphorothioate linkage
  modified_base 14..18: mod_base = OTHER; note = Phosphorothioate linkage
  modified_base 19..20: mod_base = OTHER; note = Phosphorothioate linkage
  modified_base 1..20: mod_base = OTHER; note = 2'-O-(2-methoxyethyl) ribonucleotide
  modified_base 8: mod_base = OTHER; note = 5-methyl cytidine
  modified_base 14: mod_base = OTHER; note = 5-methyl cytidine
tgttttgcttggtcaagagg

SEQ ID NO: 474 - RNA, 20 nt, synthetic construct
  source 1..20: mol_type = other RNA
  modified_base 1..3: mod_base = OTHER; note = Phosphorothioate linkage
  modified_base 4..5: mod_base = OTHER; note = Phosphorothioate linkage
  modified_base 6..7: mod_base = OTHER; note = Phosphorothioate linkage
  modified_base 8..9: mod_base = OTHER; note = Phosphorothioate linkage
  modified_base 10..11: mod_base = OTHER; note = Phosphorothioate linkage
  modified_base 12..13: mod_base = OTHER; note = Phosphorothioate linkage
  modified_base 14..15: mod_base = OTHER; note = Phosphorothioate linkage
  modified_base 16..17: mod_base = OTHER; note = Phosphorothioate linkage
  modified_base 18..20: mod_base = OTHER; note = Phosphorothioate linkage
  modified_base 1..20: mod_base = OTHER; note = 2'-O-(2-methoxyethyl) ribonucleotide
  modified_base 8: mod_base = OTHER; note = 5-methyl cytidine
  modified_base 14: mod_base = OTHER; note = 5-methyl cytidine
tgttttgcttggtcaagagg

SEQ ID NO: 475 - RNA, 20 nt, synthetic construct
  source 1..20: mol_type = other RNA
  modified_base 1..5: mod_base = OTHER; note = Phosphorothioate linkage
  modified_base 6..9: mod_base = OTHER; note = Phosphorothioate linkage
  modified_base 10..13: mod_base = OTHER; note = Phosphorothioate linkage
  modified_base 14..17: mod_base = OTHER; note = Phosphorothioate linkage
  modified_base 18..20: mod_base = OTHER; note = Phosphorothioate linkage
  modified_base 1..20: mod_base = OTHER; note = 2'-O-(2-methoxyethyl) ribonucleotide
  modified_base 8: mod_base = OTHER; note = 5-methyl cytidine
  modified_base 14: mod_base = OTHER; note = 5-methyl cytidine
tgttttgcttggtcaagagg

SEQ ID NO: 476 - RNA, 20 nt, synthetic construct
  source 1..20: mol_type = other RNA
  modified_base 1..2: mod_base = OTHER; note = Phosphorothioate linkage
  modified_base 3..6: mod_base = OTHER; note = Phosphorothioate linkage
  modified_base 7..10: mod_base = OTHER; note = Phosphorothioate linkage
  modified_base 11..14: mod_base = OTHER; note = Phosphorothioate linkage
  modified_base 15..18: mod_base = OTHER; note = Phosphorothioate linkage
  modified_base 19..20: mod_base = OTHER; note = Phosphorothioate linkage
  modified_base 1..20: mod_base = OTHER; note = 2'-O-(2-methoxyethyl) ribonucleotide
  modified_base 8: mod_base = OTHER; note = 5-methyl cytidine
  modified_base 14: mod_base = OTHER; note = 5-methyl cytidine
tgttttgcttggtcaagagg

SEQ ID NO: 477 - RNA, 20 nt, synthetic construct
  source 1..20: mol_type = other RNA
  modified_base 1..2: mod_base = OTHER; note = Phosphorothioate linkage
  modified_base 3..5: mod_base = OTHER; note = Phosphorothioate linkage
  modified_base 6..8: mod_base = OTHER; note = Phosphorothioate linkage
  modified_base 9..11: mod_base = OTHER; note = Phosphorothioate linkage
  modified_base 12..14: mod_base = OTHER; note = Phosphorothioate linkage
  modified_base 15..17: mod_base = OTHER; note = Phosphorothioate linkage
  modified_base 18..20: mod_base = OTHER; note = Phosphorothioate linkage
  modified_base 1..20: mod_base = OTHER; note = 2'-O-(2-methoxyethyl) ribonucleotide
  modified_base 8: mod_base = OTHER; note = 5-methyl cytidine
  modified_base 14: mod_base = OTHER; note = 5-methyl cytidine
tgttttgcttggtcaagagg

SEQ ID NO: 478 - RNA, 20 nt, synthetic construct
  source 1..20: mol_type = other RNA
  modified_base 1..2: mod_base = OTHER; note = Phosphorothioate linkage
  modified_base 3..4: mod_base = OTHER; note = Phosphorothioate linkage
  modified_base 5..6: mod_base = OTHER; note = Phosphorothioate linkage
  modified_base 7..8: mod_base = OTHER; note = Phosphorothioate linkage
  modified_base 9..10: mod_base = OTHER; note = Phosphorothioate linkage
  modified_base 11..12: mod_base = OTHER; note = Phosphorothioate linkage
  modified_base 13..14: mod_base = OTHER; note = Phosphorothioate linkage
  modified_base 15..16: mod_base = OTHER; note = Phosphorothioate linkage
  modified_base 17..18: mod_base = OTHER; note = Phosphorothioate linkage
  modified_base 19..20: mod_base = OTHER; note = Phosphorothioate linkage
  modified_base 1..20: mod_base = OTHER; note = 2'-O-(2-methoxyethyl) ribonucleotide
  modified_base 8: mod_base = OTHER; note = 5-methyl cytidine
  modified_base 14: mod_base = OTHER; note = 5-methyl cytidine
tgttttgcttggtcaagagg

SEQ ID NO: 479 - RNA, 20 nt, synthetic construct
  source 1..20: mol_type = other RNA
  modified_base 1..5: mod_base = OTHER; note = Phosphorothioate linkage
  modified_base 7..14: mod_base = OTHER; note = Phosphorothioate linkage
  modified_base 16..20: mod_base = OTHER; note = Phosphorothioate linkage
  modified_base 1..2: mod_base = OTHER; note = 2'-O-(2-methoxyethyl) ribonucleotide
  modified_base 3: mod_base = OTHER; note = Locked nucleic acid
  modified_base 4: mod_base = OTHER; note = 2'-O-(2-methoxyethyl) ribonucleotide
  modified_base 5: mod_base = OTHER; note = Locked nucleic acid
  modified_base 6: mod_base = OTHER; note = 2'-O-(2-methoxyethyl) ribonucleotide
  modified_base 7: mod_base = OTHER; note = Locked nucleic acid
  modified_base 8: mod_base = OTHER; note = 2'-O-(2-methoxyethyl) ribonucleotide
  modified_base 9: mod_base = OTHER; note = Locked nucleic acid
  modified_base 10: mod_base = OTHER; note = 2'-O-(2-methoxyethyl) ribonucleotide
  modified_base 11: mod_base = OTHER; note = Locked nucleic acid
  modified_base 12: mod_base = OTHER; note = 2'-O-(2-methoxyethyl) ribonucleotide
  modified_base 13: mod_base = OTHER; note = Locked nucleic acid
  modified_base 14: mod_base = OTHER; note = 2'-O-(2-methoxyethyl) ribonucleotide
  modified_base 15: mod_base = OTHER; note = Locked nucleic acid
  modified_base 16: mod_base = OTHER; note = 2'-O-(2-methoxyethyl) ribonucleotide
  modified_base 17: mod_base = OTHER; note = Locked nucleic acid
  modified_base 18..20: mod_base = OTHER; note = 2'-O-(2-methoxyethyl) ribonucleotide
  modified_base 7: mod_base = OTHER; note = 5-methyl cytidine
  modified_base 11: mod_base = OTHER; note = 5-methyl cytidine
  modified_base 16: mod_base = OTHER; note = 5-methyl cytidine
  modified_base 18: mod_base = OTHER; note = 5-methyl cytidine
gtggagcaaactaggcactg

SEQ ID NO: 480 - RNA, 20 nt, synthetic construct
  source 1..20: mol_type = other RNA
  modified_base 1..4: mod_base = OTHER; note = Phosphorothioate linkage
  modified_base 7..14: mod_base = OTHER; note = Phosphorothioate linkage
  modified_base 17..20: mod_base = OTHER; note = Phosphorothioate linkage
  modified_base 1..2: mod_base = OTHER; note = 2'-O-(2-methoxyethyl) ribonucleotide
  modified_base 3: mod_base = OTHER; note = Locked nucleic acid
  modified_base 4: mod_base = OTHER; note = 2'-O-(2-methoxyethyl) ribonucleotide
  modified_base 5: mod_base = OTHER; note = Locked nucleic acid
  modified_base 6: mod_base = OTHER; note = 2'-O-(2-methoxyethyl) ribonucleotide
  modified_base 7: mod_base = OTHER; note = Locked nucleic acid
  modified_base 8: mod_base = OTHER; note = 2'-O-(2-methoxyethyl) ribonucleotide
  modified_base 9: mod_base = OTHER; note = Locked nucleic acid
  modified_base 10: mod_base = OTHER; note = 2'-O-(2-methoxyethyl) ribonucleotide
  modified_base 11: mod_base = OTHER; note = Locked nucleic acid
  modified_base 12: mod_base = OTHER; note = 2'-O-(2-methoxyethyl) ribonucleotide
  modified_base 13: mod_base = OTHER; note = Locked nucleic acid
  modified_base 14: mod_base = OTHER; note = 2'-O-(2-methoxyethyl) ribonucleotide
  modified_base 15: mod_base = OTHER; note = Locked nucleic acid
  modified_base 16: mod_base = OTHER; note = 2'-O-(2-methoxyethyl) ribonucleotide
  modified_base 17: mod_base = OTHER; note = Locked nucleic acid
  modified_base 18..20: mod_base = OTHER; note = 2'-O-(2-methoxyethyl) ribonucleotide
  modified_base 7: mod_base = OTHER; note = 5-methyl cytidine
  modified_base 11: mod_base = OTHER; note = 5-methyl cytidine
  modified_base 16: mod_base = OTHER; note = 5-methyl cytidine
  modified_base 18: mod_base = OTHER; note = 5-methyl cytidine
gtggagcaaactaggcactg

SEQ ID NO: 481 - RNA, 20 nt, synthetic construct
  source 1..20: mol_type = other RNA
  modified_base 1..3: mod_base = OTHER; note = Phosphorothioate linkage
  modified_base 7..14: mod_base = OTHER; note = Phosphorothioate linkage
  modified_base 18..20: mod_base = OTHER; note = Phosphorothioate linkage
  modified_base 1..2: mod_base = OTHER; note = 2'-O-(2-methoxyethyl) ribonucleotide
  modified_base 3: mod_base = OTHER; note = Locked nucleic acid
  modified_base 4: mod_base = OTHER; note = 2'-O-(2-methoxyethyl) ribonucleotide
  modified_base 5: mod_base = OTHER; note = Locked nucleic acid
  modified_base 6: mod_base = OTHER; note = 2'-O-(2-methoxyethyl) ribonucleotide
  modified_base 7: mod_base = OTHER; note = Locked nucleic acid
  modified_base 8: mod_base = OTHER; note = 2'-O-(2-methoxyethyl) ribonucleotide
  modified_base 9: mod_base = OTHER; note = Locked nucleic acid
  modified_base 10: mod_base = OTHER; note = 2'-O-(2-methoxyethyl) ribonucleotide
  modified_base 11: mod_base = OTHER; note = Locked nucleic acid
  modified_base 12: mod_base = OTHER; note = 2'-O-(2-methoxyethyl) ribonucleotide
  modified_base 13: mod_base = OTHER; note = Locked nucleic acid
  modified_base 14: mod_base = OTHER; note = 2'-O-(2-methoxyethyl) ribonucleotide
  modified_base 15: mod_base = OTHER; note = Locked nucleic acid
  modified_base 16: mod_base = OTHER; note = 2'-O-(2-methoxyethyl) ribonucleotide
  modified_base 17: mod_base = OTHER; note = Locked nucleic acid
  modified_base 18..20: mod_base = OTHER; note = 2'-O-(2-methoxyethyl) ribonucleotide
  modified_base 7: mod_base = OTHER; note = 5-methyl cytidine
  modified_base 11: mod_base = OTHER; note = 5-methyl cytidine
  modified_base 16: mod_base = OTHER; note = 5-methyl cytidine
  modified_base 18: mod_base = OTHER; note = 5-methyl cytidine
gtggagcaaactaggcactg

SEQ ID NO: 482 - RNA, 20 nt, synthetic construct
  source 1..20: mol_type = other RNA
  modified_base 1..2: mod_base = OTHER; note = Phosphorothioate linkage
  modified_base 7..14: mod_base = OTHER; note = Phosphorothioate linkage
  modified_base 19..20: mod_base = OTHER; note = Phosphorothioate linkage
  modified_base 1..2: mod_base = OTHER; note = 2'-O-(2-methoxyethyl) ribonucleotide
  modified_base 3: mod_base = OTHER; note = Locked nucleic acid
  modified_base 4: mod_base = OTHER; note = 2'-O-(2-methoxyethyl) ribonucleotide
  modified_base 5: mod_base = OTHER; note = Locked nucleic acid
  modified_base 6: mod_base = OTHER; note = 2'-O-(2-methoxyethyl) ribonucleotide
  modified_base 7: mod_base = OTHER; note = Locked nucleic acid
  modified_base 8: mod_base = OTHER; note = 2'-O-(2-methoxyethyl) ribonucleotide
  modified_base 9: mod_base = OTHER; note = Locked nucleic acid
  modified_base 10: mod_base = OTHER; note = 2'-O-(2-methoxyethyl) ribonucleotide
  modified_base 11: mod_base = OTHER; note = Locked nucleic acid
  modified_base 12: mod_base = OTHER; note = 2'-O-(2-methoxyethyl) ribonucleotide
  modified_base 13: mod_base = OTHER; note = Locked nucleic acid
  modified_base 14: mod_base = OTHER; note = 2'-O-(2-methoxyethyl) ribonucleotide
  modified_base 15: mod_base = OTHER; note = Locked nucleic acid
  modified_base 16: mod_base = OTHER; note = 2'-O-(2-methoxyethyl) ribonucleotide
  modified_base 17: mod_base = OTHER; note = Locked nucleic acid
  modified_base 18..20: mod_base = OTHER; note = 2'-O-(2-methoxyethyl) ribonucleotide
  modified_base 7: mod_base = OTHER; note = 5-methyl cytidine
  modified_base 11: mod_base = OTHER; note = 5-methyl cytidine
  modified_base 16: mod_base = OTHER; note = 5-methyl cytidine
  modified_base 18: mod_base = OTHER; note = 5-methyl cytidine
gtggagcaaactaggcactg

SEQ ID NO: 483 - RNA, 20 nt, synthetic construct
  source 1..20: mol_type = other RNA
  modified_base 1..3: mod_base = OTHER; note = Phosphorothioate linkage
  modified_base 5..8: mod_base = OTHER; note = Phosphorothioate linkage
  modified_base 9..13: mod_base = OTHER; note = Phosphorothioate linkage
  modified_base 14..18: mod_base = OTHER; note = Phosphorothioate linkage
  modified_base 19..20: mod_base = OTHER; note = Phosphorothioate linkage
  modified_base 1..2: mod_base = OTHER; note = 2'-O-(2-methoxyethyl) ribonucleotide
  modified_base 3: mod_base = OTHER; note = Locked nucleic acid
  modified_base 4: mod_base = OTHER; note = 2'-O-(2-methoxyethyl) ribonucleotide
  modified_base 5: mod_base = OTHER; note = Locked nucleic acid
  modified_base 6: mod_base = OTHER; note = 2'-O-(2-methoxyethyl) ribonucleotide
  modified_base 7: mod_base = OTHER; note = Locked nucleic acid
  modified_base 8: mod_base = OTHER; note = 2'-O-(2-methoxyethyl) ribonucleotide
  modified_base 9: mod_base = OTHER; note = Locked nucleic acid
  modified_base 10: mod_base = OTHER; note = 2'-O-(2-methoxyethyl) ribonucleotide
  modified_base 11: mod_base = OTHER; note = Locked nucleic acid
  modified_base 12: mod_base = OTHER; note = 2'-O-(2-methoxyethyl) ribonucleotide
  modified_base 13: mod_base = OTHER; note = Locked nucleic acid
  modified_base 14: mod_base = OTHER; note = 2'-O-(2-methoxyethyl) ribonucleotide
  modified_base 15: mod_base = OTHER; note = Locked nucleic acid
  modified_base 16: mod_base = OTHER; note = 2'-O-(2-methoxyethyl) ribonucleotide
  modified_base 17: mod_base = OTHER; note = Locked nucleic acid
  modified_base 18..20: mod_base = OTHER; note = 2'-O-(2-methoxyethyl) ribonucleotide
  modified_base 7: mod_base = OTHER; note = 5-methyl cytidine
  modified_base 11: mod_base = OTHER; note = 5-methyl cytidine
  modified_base 16: mod_base = OTHER; note = 5-methyl cytidine
  modified_base 18: mod_base = OTHER; note = 5-methyl cytidine
gtggagcaaactaggcactg

SEQ ID NO: 484 - RNA, 20 nt, synthetic construct
  source 1..20: mol_type = other RNA
  modified_base 1..4: mod_base = OTHER; note = Phosphorothioate linkage
  modified_base 5..8: mod_base = OTHER; note = Phosphorothioate linkage
  modified_base 9..12: mod_base = OTHER; note = Phosphorothioate linkage
  modified_base 13..16: mod_base = OTHER; note = Phosphorothioate linkage
  modified_base 17..20: mod_base = OTHER; note = Phosphorothioate linkage
  modified_base 1..2: mod_base = OTHER; note = 2'-O-(2-methoxyethyl) ribonucleotide
  modified_base 3: mod_base = OTHER; note = Locked nucleic acid
  modified_base 4: mod_base = OTHER; note = 2'-O-(2-methoxyethyl) ribonucleotide
  modified_base 5: mod_base = OTHER; note = Locked nucleic acid
  modified_base 6: mod_base = OTHER; note = 2'-O-(2-methoxyethyl) ribonucleotide
  modified_base 7: mod_base = OTHER; note = Locked nucleic acid
  modified_base 8: mod_base = OTHER; note = 2'-O-(2-methoxyethyl) ribonucleotide
  modified_base 9: mod_base = OTHER; note = Locked nucleic acid
  modified_base 10: mod_base = OTHER; note = 2'-O-(2-methoxyethyl) ribonucleotide
  modified_base 11: mod_base = OTHER; note = Locked nucleic acid
  modified_base 12: mod_base = OTHER; note = 2'-O-(2-methoxyethyl) ribonucleotide
  modified_base 13: mod_base = OTHER; note = Locked nucleic acid
  modified_base 14: mod_base = OTHER; note = 2'-O-(2-methoxyethyl) ribonucleotide
  modified_base 15: mod_base = OTHER; note = Locked nucleic acid
  modified_base 16: mod_base = OTHER; note = 2'-O-(2-methoxyethyl) ribonucleotide
  modified_base 17: mod_base = OTHER; note = Locked nucleic acid
  modified_base 18..20: mod_base = OTHER; note = 2'-O-(2-methoxyethyl) ribonucleotide
  modified_base 7: mod_base = OTHER; note = 5-methyl cytidine
  modified_base 11: mod_base = OTHER; note = 5-methyl cytidine
  modified_base 16: mod_base = OTHER; note = 5-methyl cytidine
  modified_base 18: mod_base = OTHER; note = 5-methyl cytidine
gtggagcaaactaggcactg

SEQ ID NO: 485 - RNA, 20 nt, synthetic construct
  source 1..20: mol_type = other RNA
  modified_base 1..5: mod_base = OTHER; note = Phosphorothioate linkage
  modified_base 6..9: mod_base = OTHER; note = Phosphorothioate linkage
  modified_base 10..13: mod_base = OTHER; note = Phosphorothioate linkage
  modified_base 14..17: mod_base = OTHER; note = Phosphorothioate linkage
  modified_base 18..20: mod_base = OTHER; note = Phosphorothioate linkage
  modified_base 1..2: mod_base = OTHER; note = 2'-O-(2-methoxyethyl) ribonucleotide
  modified_base 3: mod_base = OTHER; note = Locked nucleic acid
  modified_base 4: mod_base = OTHER; note = 2'-O-(2-methoxyethyl) ribonucleotide
  modified_base 5: mod_base = OTHER; note = Locked nucleic acid
  modified_base 6: mod_base = OTHER; note = 2'-O-(2-methoxyethyl) ribonucleotide
  modified_base 7: mod_base = OTHER; note = Locked nucleic acid
  modified_base 8: mod_base = OTHER; note = 2'-O-(2-methoxyethyl) ribonucleotide
  modified_base 9: mod_base = OTHER; note = Locked nucleic acid
  modified_base 10: mod_base = OTHER; note = 2'-O-(2-methoxyethyl) ribonucleotide
  modified_base 11: mod_base = OTHER; note = Locked nucleic acid
  modified_base 12: mod_base = OTHER; note = 2'-O-(2-methoxyethyl) ribonucleotide
  modified_base 13: mod_base = OTHER; note = Locked nucleic acid
  modified_base 14: mod_base = OTHER; note = 2'-O-(2-methoxyethyl) ribonucleotide
  modified_base 15: mod_base = OTHER; note = Locked nucleic acid
  modified_base 16: mod_base = OTHER; note = 2'-O-(2-methoxyethyl) ribonucleotide
  modified_base 17: mod_base = OTHER; note = Locked nucleic acid
  modified_base 18..20: mod_base = OTHER; note = 2'-O-(2-methoxyethyl) ribonucleotide
  modified_base 7: mod_base = OTHER; note = 5-methyl cytidine
  modified_base 11: mod_base = OTHER; note = 5-methyl cytidine
  modified_base 16: mod_base = OTHER; note = 5-methyl cytidine
  modified_base 18: mod_base = OTHER; note = 5-methyl cytidine
gtggagcaaactaggcactg

SEQ ID NO: 486 - RNA, 20 nt, synthetic construct
  source 1..20: mol_type = other RNA
  modified_base 1..2: mod_base = OTHER; note = Phosphorothioate linkage
  modified_base 3..6: mod_base = OTHER; note = Phosphorothioate linkage
  modified_base 7..10: mod_base = OTHER; note = Phosphorothioate linkage
  modified_base 11..14: mod_base = OTHER; note = Phosphorothioate linkage
  modified_base 15..18: mod_base = OTHER; note = Phosphorothioate linkage
  modified_base 19..20: mod_base = OTHER; note = Phosphorothioate linkage
  modified_base 1..2: mod_base = OTHER; note = 2'-O-(2-methoxyethyl) ribonucleotide
  modified_base 3: mod_base = OTHER; note = Locked nucleic acid
  modified_base 4: mod_base = OTHER; note = 2'-O-(2-methoxyethyl) ribonucleotide
  modified_base 5: mod_base = OTHER; note = Locked nucleic acid
  modified_base 6: mod_base = OTHER; note = 2'-O-(2-methoxyethyl) ribonucleotide
  modified_base 7: mod_base = OTHER; note = Locked nucleic acid
  modified_base 8: mod_base = OTHER; note = 2'-O-(2-methoxyethyl) ribonucleotide
  modified_base 9: mod_base = OTHER; note = Locked nucleic acid
  modified_base 10: mod_base = OTHER; note = 2'-O-(2-methoxyethyl) ribonucleotide
  modified_base 11: mod_base = OTHER; note = Locked nucleic acid
  modified_base 12: mod_base = OTHER; note = 2'-O-(2-methoxyethyl) ribonucleotide
  modified_base 13: mod_base = OTHER; note = Locked nucleic acid
  modified_base 14: mod_base = OTHER; note = 2'-O-(2-methoxyethyl) ribonucleotide
  modified_base 15: mod_base = OTHER; note = Locked nucleic acid
  modified_base 16: mod_base = OTHER; note = 2'-O-(2-methoxyethyl) ribonucleotide
  modified_base 17: mod_base = OTHER; note = Locked nucleic acid
  modified_base 18..20: mod_base = OTHER; note = 2'-O-(2-methoxyethyl) ribonucleotide
  modified_base 7: mod_base = OTHER; note = 5-methyl cytidine
  modified_base 11: mod_base = OTHER; note = 5-methyl cytidine
  modified_base 16: mod_base = OTHER; note = 5-methyl cytidine
  modified_base 18: mod_base = OTHER; note = 5-methyl cytidine
gtggagcaaactaggcactg

SEQ ID NO: 487 - RNA, 20 nt, synthetic construct
  source 1..20: mol_type = other RNA
  modified_base 1..2: mod_base = OTHER; note = Phosphorothioate linkage
  modified_base 3..5: mod_base = OTHER; note = Phosphorothioate linkage
  modified_base 6..8: mod_base = OTHER; note = Phosphorothioate linkage
  modified_base 9..11: mod_base = OTHER; note = Phosphorothioate linkage
  modified_base 12..14: mod_base = OTHER; note = Phosphorothioate linkage
  modified_base 15..17: mod_base = OTHER; note = Phosphorothioate linkage
  modified_base 18..20: mod_base = OTHER; note = Phosphorothioate linkage
  modified_base 1..2: mod_base = OTHER; note = 2'-O-(2-methoxyethyl) ribonucleotide
  modified_base 3: mod_base = OTHER; note = Locked nucleic acid
  modified_base 4: mod_base = OTHER; note = 2'-O-(2-methoxyethyl) ribonucleotide
  modified_base 5: mod_base = OTHER; note = Locked nucleic acid
  modified_base 6: mod_base = OTHER; note = 2'-O-(2-methoxyethyl) ribonucleotide
  modified_base 7: mod_base = OTHER; note = Locked nucleic acid
  modified_base 8: mod_base = OTHER; note = 2'-O-(2-methoxyethyl) ribonucleotide
  modified_base 9: mod_base = OTHER; note = Locked nucleic acid
  modified_base 10: mod_base = OTHER; note = 2'-O-(2-methoxyethyl) ribonucleotide
  modified_base 11: mod_base = OTHER; note = Locked nucleic acid
  modified_base 12: mod_base = OTHER; note = 2'-O-(2-methoxyethyl) ribonucleotide
  modified_base 13: mod_base = OTHER; note = Locked nucleic acid
  modified_base 14: mod_base = OTHER; note = 2'-O-(2-methoxyethyl) ribonucleotide
  modified_base 15: mod_base = OTHER; note = Locked nucleic acid
  modified_base 16: mod_base = OTHER; note = 2'-O-(2-methoxyethyl) ribonucleotide
  modified_base 17: mod_base = OTHER; note = Locked nucleic acid
  modified_base 18..20: mod_base = OTHER; note = 2'-O-(2-methoxyethyl) ribonucleotide
  modified_base 7: mod_base = OTHER; note = 5-methyl cytidine
  modified_base 11: mod_base = OTHER; note = 5-methyl cytidine
  modified_base 16: mod_base = OTHER; note = 5-methyl cytidine
  modified_base 18: mod_base = OTHER; note = 5-methyl cytidine
gtggagcaaactaggcactg

SEQ ID NO: 488 - RNA, 20 nt, synthetic construct
  source 1..20: mol_type = other RNA
  modified_base 1..3: mod_base = OTHER; note = Phosphorothioate linkage
  modified_base 4..6: mod_base = OTHER; note = Phosphorothioate linkage
  modified_base 7..9: mod_base = OTHER; note = Phosphorothioate linkage
  modified_base 10..12: mod_base = OTHER; note = Phosphorothioate linkage
  modified_base 13..15: mod_base = OTHER; note = Phosphorothioate linkage
  modified_base 16..18: mod_base = OTHER; note = Phosphorothioate linkage
  modified_base 19..20: mod_base = OTHER; note = Phosphorothioate linkage
  modified_base 1..2: mod_base = OTHER; note = 2'-O-(2-methoxyethyl) ribonucleotide
  modified_base 3: mod_base = OTHER; note = Locked nucleic acid
  modified_base 4: mod_base = OTHER; note = 2'-O-(2-methoxyethyl) ribonucleotide
  modified_base 5: mod_base = OTHER; note = Locked nucleic acid
  modified_base 6: mod_base = OTHER; note = 2'-O-(2-methoxyethyl) ribonucleotide
  modified_base 7: mod_base = OTHER; note = Locked nucleic acid
  modified_base 8: mod_base = OTHER; note = 2'-O-(2-methoxyethyl) ribonucleotide
  modified_base 9: mod_base = OTHER; note = Locked nucleic acid
  modified_base 10: mod_base = OTHER; note = 2'-O-(2-methoxyethyl) ribonucleotide
  modified_base 11: mod_base = OTHER; note = Locked nucleic acid
  modified_base 12: mod_base = OTHER; note = 2'-O-(2-methoxyethyl) ribonucleotide
  modified_base 13: mod_base = OTHER; note = Locked nucleic acid
  modified_base 14: mod_base = OTHER; note = 2'-O-(2-methoxyethyl) ribonucleotide
  modified_base 15: mod_base = OTHER; note = Locked nucleic acid
  modified_base 16: mod_base = OTHER; note = 2'-O-(2-methoxyethyl) ribonucleotide
  modified_base 17: mod_base = OTHER; note = Locked nucleic acid
  modified_base 18..20: mod_base = OTHER; note = 2'-O-(2-methoxyethyl) ribonucleotide
  modified_base 7: mod_base = OTHER; note = 5-methyl cytidine
  modified_base 11: mod_base = OTHER; note = 5-methyl cytidine
  modified_base 16: mod_base = OTHER; note = 5-methyl cytidine
  modified_base 18: mod_base = OTHER; note = 5-methyl cytidine
gtggagcaaactaggcactg

SEQ ID NO: 489 - RNA, 20 nt, synthetic construct
  source 1..20: mol_type = other RNA
  modified_base 1..3: mod_base = OTHER; note = Phosphorothioate linkage
  modified_base 4..5: mod_base = OTHER; note = Phosphorothioate linkage
  modified_base 6..7: mod_base = OTHER; note = Phosphorothioate linkage
  modified_base 8..9: mod_base = OTHER; note = Phosphorothioate linkage
  modified_base 10..11: mod_base = OTHER; note = Phosphorothioate linkage
  modified_base 12..13: mod_base = OTHER; note = Phosphorothioate linkage
  modified_base 14..15: mod_base = OTHER; note = Phosphorothioate linkage
  modified_base 16..17: mod_base = OTHER; note = Phosphorothioate linkage
  modified_base 18..20: mod_base = OTHER; note = Phosphorothioate linkage
  modified_base 1..2: mod_base = OTHER; note = 2'-O-(2-methoxyethyl) ribonucleotide
  modified_base 3: mod_base = OTHER; note = Locked nucleic acid
  modified_base 4: mod_base = OTHER; note = 2'-O-(2-methoxyethyl) ribonucleotide
  modified_base 5: mod_base = OTHER; note = Locked nucleic acid
  modified_base 6: mod_base = OTHER; note = 2'-O-(2-methoxyethyl) ribonucleotide
  modified_base 7: mod_base = OTHER; note = Locked nucleic acid
  modified_base 8: mod_base = OTHER; note = 2'-O-(2-methoxyethyl) ribonucleotide
  modified_base 9: mod_base = OTHER; note = Locked nucleic acid
  modified_base 10: mod_base = OTHER; note = 2'-O-(2-methoxyethyl) ribonucleotide
  modified_base 11: mod_base = OTHER; note = Locked nucleic acid
  modified_base 12: mod_base = OTHER; note = 2'-O-(2-methoxyethyl) ribonucleotide
  modified_base 13: mod_base = OTHER; note = Locked nucleic acid
  modified_base 14: mod_base = OTHER; note = 2'-O-(2-methoxyethyl) ribonucleotide
  modified_base 15: mod_base = OTHER; note = Locked nucleic acid
  modified_base 16: mod_base = OTHER; note = 2'-O-(2-methoxyethyl) ribonucleotide
  modified_base 17: mod_base = OTHER; note = Locked nucleic acid
  modified_base 18..20: mod_base = OTHER; note = 2'-O-(2-methoxyethyl) ribonucleotide
  modified_base 7: mod_base = OTHER; note = 5-methyl cytidine
  modified_base 11: mod_base = OTHER; note = 5-methyl cytidine
  modified_base 16: mod_base = OTHER; note = 5-methyl cytidine
  modified_base 18: mod_base = OTHER; note = 5-methyl cytidine
gtggagcaaactaggcactg

SEQ ID NO: 490 - RNA, 20 nt, synthetic construct
  source 1..20: mol_type = other RNA
  modified_base 1..2: mod_base = OTHER; note = Phosphorothioate linkage
  modified_base 3..4: mod_base = OTHER; note = Phosphorothioate linkage
  modified_base 5..6: mod_base = OTHER; note = Phosphorothioate linkage
  modified_base 7..8: mod_base = OTHER; note = Phosphorothioate linkage
  modified_base 9..10: mod_base = OTHER; note = Phosphorothioate linkage
  modified_base 11..12: mod_base = OTHER; note = Phosphorothioate linkage
  modified_base 13..14: mod_base = OTHER; note = Phosphorothioate linkage
  modified_base 15..16: mod_base = OTHER; note = Phosphorothioate linkage
  modified_base 17..18: mod_base = OTHER; note = Phosphorothioate linkage
  modified_base 19..20: mod_base = OTHER; note = Phosphorothioate linkage
  modified_base 1..2: mod_base = OTHER; note = 2'-O-(2-methoxyethyl) ribonucleotide
  modified_base 3: mod_base = OTHER; note = Locked nucleic acid
  modified_base 4: mod_base = OTHER; note = 2'-O-(2-methoxyethyl) ribonucleotide
  modified_base 5: mod_base = OTHER; note = Locked nucleic acid
  modified_base 6: mod_base = OTHER; note = 2'-O-(2-methoxyethyl) ribonucleotide
  modified_base 7: mod_base = OTHER; note = Locked nucleic acid
  modified_base 8: mod_base = OTHER; note = 2'-O-(2-methoxyethyl) ribonucleotide
  modified_base 9: mod_base = OTHER; note = Locked nucleic acid
  modified_base 10: mod_base = OTHER; note = 2'-O-(2-methoxyethyl) ribonucleotide
  modified_base 11: mod_base = OTHER; note = Locked nucleic acid
  modified_base 12: mod_base = OTHER; note = 2'-O-(2-methoxyethyl) ribonucleotide
  modified_base 13: mod_base = OTHER; note = Locked nucleic acid
  modified_base 14: mod_base = OTHER; note = 2'-O-(2-methoxyethyl) ribonucleotide
  modified_base 15: mod_base = OTHER; note = Locked nucleic acid
  modified_base 16: mod_base = OTHER; note = 2'-O-(2-methoxyethyl) ribonucleotide
  modified_base 17: mod_base = OTHER; note = Locked nucleic acid
  modified_base 18..20: mod_base = OTHER; note = 2'-O-(2-methoxyethyl) ribonucleotide
  modified_base 7: mod_base = OTHER; note = 5-methyl cytidine
  modified_base 11: mod_base = OTHER; note = 5-methyl cytidine
  modified_base 16: mod_base = OTHER; note = 5-methyl cytidine
  modified_base 18: mod_base = OTHER; note = 5-methyl cytidine
gtggagcaaactaggcactg

SEQ ID NO: 491 - RNA, 20 nt, synthetic construct
  source 1..20: mol_type = other RNA
  modified_base 1..5: mod_base = OTHER; note = Phosphorothioate linkage
  modified_base 7..14: mod_base = OTHER; note = Phosphorothioate linkage
  modified_base 16..20: mod_base = OTHER; note = Phosphorothioate linkage
  modified_base 1..2: mod_base = OTHER; note = 2'-O-(2-methoxyethyl) ribonucleotide
  modified_base 3: mod_base = OTHER; note = Locked nucleic acid
  modified_base 4..5: mod_base = OTHER; note = 2'-O-(2-methoxyethyl) ribonucleotide
  modified_base 6: mod_base = OTHER; note = Locked nucleic acid
  modified_base 7..8: mod_base = OTHER; note = 2'-O-(2-methoxyethyl) ribonucleotide
  modified_base 9: mod_base = OTHER; note = Locked nucleic acid
  modified_base 10..11: mod_base = OTHER; note = 2'-O-(2-methoxyethyl) ribonucleotide
  modified_base 12: mod_base = OTHER; note = Locked nucleic acid
  modified_base 13..14: mod_base = OTHER; note = 2'-O-(2-methoxyethyl) ribonucleotide
  modified_base 15: mod_base = OTHER; note = Locked nucleic acid
  modified_base 16..17: mod_base = OTHER; note = 2'-O-(2-methoxyethyl) ribonucleotide
  modified_base 18: mod_base = OTHER; note = Locked nucleic acid
  modified_base 19..20: mod_base = OTHER; note = 2'-O-(2-methoxyethyl) ribonucleotide
  modified_base 7: mod_base = OTHER; note = 5-methyl cytidine
  modified_base 11: mod_base = OTHER; note = 5-methyl cytidine
  modified_base 16: mod_base = OTHER; note = 5-methyl cytidine
  modified_base 18: mod_base = OTHER; note = 5-methyl cytidine
gtggagcaaactaggcactg

SEQ ID NO: 492 - RNA, 20 nt, synthetic construct
  source 1..20: mol_type = other RNA
  modified_base 1..4: mod_base = OTHER; note = Phosphorothioate linkage
  modified_base 7..14: mod_base = OTHER; note = Phosphorothioate linkage
  modified_base 17..20: mod_base = OTHER; note = Phosphorothioate linkage
  modified_base 1..2: mod_base = OTHER; note = 2'-O-(2-methoxyethyl) ribonucleotide
  modified_base 3: mod_base = OTHER; note = Locked nucleic acid
  modified_base 4..5: mod_base = OTHER; note = 2'-O-(2-methoxyethyl) ribonucleotide
  modified_base 6: mod_base = OTHER; note = Locked nucleic acid
  modified_base 7..8: mod_base = OTHER; note = 2'-O-(2-methoxyethyl) ribonucleotide
  modified_base 9: mod_base = OTHER; note = Locked nucleic acid
  modified_base 10..11: mod_base = OTHER; note = 2'-O-(2-methoxyethyl) ribonucleotide
  modified_base 12: mod_base = OTHER; note = Locked nucleic acid
  modified_base 13..14: mod_base = OTHER; note = 2'-O-(2-methoxyethyl) ribonucleotide
  modified_base 15: mod_base = OTHER; note = Locked nucleic acid
  modified_base 16..17: mod_base = OTHER; note = 2'-O-(2-methoxyethyl) ribonucleotide
  modified_base 18: mod_base = OTHER; note = Locked nucleic acid
  modified_base 19..20: mod_base = OTHER; note = 2'-O-(2-methoxyethyl) ribonucleotide
  modified_base 7: mod_base = OTHER; note = 5-methyl cytidine
  modified_base 11: mod_base = OTHER; note = 5-methyl cytidine
  modified_base 16: mod_base = OTHER; note = 5-methyl cytidine
  modified_base 18: mod_base = OTHER; note = 5-methyl cytidine
gtggagcaaactaggcactg

SEQ ID NO: 493 - RNA, 20 nt, synthetic construct
  source 1..20: mol_type = other RNA
  modified_base 1..3: mod_base = OTHER; note = Phosphorothioate linkage
  modified_base 7..14: mod_base = OTHER; note = Phosphorothioate linkage
  modified_base 18..20: mod_base = OTHER; note = Phosphorothioate linkage
  modified_base 1..2: mod_base = OTHER; note = 2'-O-(2-methoxyethyl) ribonucleotide
  modified_base 3: mod_base = OTHER; note = Locked nucleic acid
  modified_base 4..5: mod_base = OTHER; note = 2'-O-(2-methoxyethyl) ribonucleotide
  modified_base 6: mod_base = OTHER; note = Locked nucleic acid
  modified_base 7..8: mod_base = OTHER; note = 2'-O-(2-methoxyethyl) ribonucleotide
  modified_base 9: mod_base = OTHER; note = Locked nucleic acid
  modified_base 10..11: mod_base = OTHER; note = 2'-O-(2-methoxyethyl) ribonucleotide
  modified_base 12: mod_base = OTHER; note = Locked nucleic acid
  modified_base 13..14: mod_base = OTHER; note = 2'-O-(2-methoxyethyl) ribonucleotide
  modified_base 15: mod_base = OTHER; note = Locked nucleic acid
  modified_base 16..17: mod_base = OTHER; note = 2'-O-(2-methoxyethyl) ribonucleotide
  modified_base 18: mod_base = OTHER; note = Locked nucleic acid
  modified_base 19..20: mod_base = OTHER; note = 2'-O-(2-methoxyethyl) ribonucleotide
  modified_base 7: mod_base = OTHER; note = 5-methyl cytidine
  modified_base 11: mod_base = OTHER; note = 5-methyl cytidine
  modified_base 16: mod_base = OTHER; note = 5-methyl cytidine
  modified_base 18: mod_base = OTHER; note = 5-methyl cytidine
gtggagcaaactaggcactg

SEQ ID NO: 494 - RNA, 20 nt, synthetic construct
  source 1..20: mol_type = other RNA
  modified_base 1..2: mod_base = OTHER; note = Phosphorothioate linkage
  modified_base 7..14: mod_base = OTHER; note = Phosphorothioate linkage
  modified_base 19..20: mod_base = OTHER; note = Phosphorothioate linkage
  modified_base 1..2: mod_base = OTHER; note = 2'-O-(2-methoxyethyl) ribonucleotide
  modified_base 3: mod_base = OTHER; note = Locked nucleic acid
  modified_base 4..5: mod_base = OTHER; note = 2'-O-(2-methoxyethyl) ribonucleotide
  modified_base 6: mod_base = OTHER; note = Locked nucleic acid
  modified_base 7..8: mod_base = OTHER; note = 2'-O-(2-methoxyethyl) ribonucleotide
  modified_base 9: mod_base = OTHER; note = Locked nucleic acid
  modified_base 10..11: mod_base = OTHER; note = 2'-O-(2-methoxyethyl) ribonucleotide
  modified_base 12: mod_base = OTHER; note = Locked nucleic acid
  modified_base 13..14: mod_base = OTHER; note = 2'-O-(2-methoxyethyl) ribonucleotide
  modified_base 15: mod_base = OTHER; note = Locked nucleic acid
  modified_base 16..17: mod_base = OTHER; note = 2'-O-(2-methoxyethyl) ribonucleotide
  modified_base 18: mod_base = OTHER; note = Locked nucleic acid
  modified_base 19..20: mod_base = OTHER; note = 2'-O-(2-methoxyethyl) ribonucleotide
  modified_base 7: mod_base = OTHER; note = 5-methyl cytidine
  modified_base 11: mod_base = OTHER; note = 5-methyl cytidine
  modified_base 16: mod_base = OTHER; note = 5-methyl cytidine
  modified_base 18: mod_base = OTHER; note = 5-methyl cytidine
gtggagcaaactaggcactg

SEQ ID NO: 495 - RNA, 20 nt, synthetic construct
  source 1..20: mol_type = other RNA
  modified_base 1..3: mod_base = OTHER; note = Phosphorothioate linkage
  modified_base 4..8: mod_base = OTHER; note = Phosphorothioate linkage
  modified_base 9..13: mod_base = OTHER; note = Phosphorothioate linkage
  modified_base 14..18: mod_base = OTHER; note = Phosphorothioate linkage
  modified_base 19..20: mod_base = OTHER; note = Phosphorothioate linkage
  modified_base 1..2: mod_base = OTHER; note = 2'-O-(2-methoxyethyl) ribonucleotide
  modified_base 3: mod_base = OTHER; note = Locked nucleic acid
  modified_base 4..5: mod_base = OTHER; note = 2'-O-(2-methoxyethyl) ribonucleotide
  modified_base 6: mod_base = OTHER; note = Locked nucleic acid
  modified_base 7..8: mod_base = OTHER; note = 2'-O-(2-methoxyethyl) ribonucleotide
  modified_base 9: mod_base = OTHER; note = Locked nucleic acid
  modified_base 10..11: mod_base = OTHER; note = 2'-O-(2-methoxyethyl) ribonucleotide
  modified_base 12: mod_base = OTHER; note = Locked nucleic acid
  modified_base 13..14: mod_base = OTHER; note = 2'-O-(2-methoxyethyl) ribonucleotide
  modified_base 15: mod_base = OTHER; note = Locked nucleic acid
  modified_base 16..17: mod_base = OTHER; note = 2'-O-(2-methoxyethyl) ribonucleotide
  modified_base 18: mod_base = OTHER; note = Locked nucleic acid
  modified_base 19..20: mod_base = OTHER; note = 2'-O-(2-methoxyethyl) ribonucleotide
  modified_base 7: mod_base = OTHER; note = 5-methyl cytidine
  modified_base 11: mod_base = OTHER; note = 5-methyl cytidine
  modified_base 16: mod_base = OTHER; note = 5-methyl cytidine
  modified_base 18: mod_base = OTHER; note = 5-methyl cytidine
gtggagcaaactaggcactg

SEQ ID NO: 496 - RNA, 20 nt, synthetic construct
  source 1..20: mol_type = other RNA
  modified_base 1..4: mod_base = OTHER; note = Phosphorothioate linkage
  modified_base 5..8: mod_base = OTHER; note = Phosphorothioate linkage
  modified_base 9..12: mod_base = OTHER; note = Phosphorothioate linkage
  modified_base 13..16: mod_base = OTHER; note = Phosphorothioate linkage
  modified_base 17..20: mod_base = OTHER; note = Phosphorothioate linkage
  modified_base 1..2: mod_base = OTHER; note = 2'-O-(2-methoxyethyl) ribonucleotide
  modified_base 3: mod_base = OTHER; note = Locked nucleic acid
  modified_base 4..5: mod_base = OTHER; note = 2'-O-(2-methoxyethyl) ribonucleotide
  modified_base 6: mod_base = OTHER; note = Locked nucleic acid
  modified_base 7..8: mod_base = OTHER; note = 2'-O-(2-methoxyethyl) ribonucleotide
  modified_base 9: mod_base = OTHER; note = Locked nucleic acid
  modified_base 10..11: mod_base = OTHER; note = 2'-O-(2-methoxyethyl) ribonucleotide
  modified_base 12: mod_base = OTHER; note = Locked nucleic acid
  modified_base 13..14: mod_base = OTHER; note = 2'-O-(2-methoxyethyl) ribonucleotide
  modified_base 15: mod_base = OTHER; note = Locked nucleic acid
  modified_base 16..17: mod_base = OTHER; note = 2'-O-(2-methoxyethyl) ribonucleotide
  modified_base 18: mod_base = OTHER; note = Locked nucleic acid
  modified_base 19..20: mod_base = OTHER; note = 2'-O-(2-methoxyethyl) ribonucleotide
  modified_base 7: mod_base = OTHER; note = 5-methyl cytidine
  modified_base 11: mod_base = OTHER; note = 5-methyl cytidine
  modified_base 16: mod_base = OTHER; note = 5-methyl cytidine
  modified_base 18: mod_base = OTHER; note = 5-methyl cytidine
gtggagcaaactaggcactg

SEQ ID NO: 497 - RNA, 20 nt, synthetic construct
  source 1..20: mol_type = other RNA
  modified_base 1..5: mod_base = OTHER; note = Phosphorothioate linkage
  modified_base 6..9: mod_base = OTHER; note = Phosphorothioate linkage
  modified_base 12..13: mod_base = OTHER; note = Phosphorothioate linkage
  modified_base 14..17: mod_base = OTHER; note = Phosphorothioate linkage
  modified_base 18..20: mod_base = OTHER; note = Phosphorothioate linkage
  modified_base 1..2: mod_base = OTHER; note = 2'-O-(2-methoxyethyl) ribonucleotide
  modified_base 3: mod_base = OTHER; note = Locked nucleic acid
  modified_base 4..5: mod_base = OTHER; note = 2'-O-(2-methoxyethyl) ribonucleotide
  modified_base 6: mod_base = OTHER; note = Locked nucleic acid
  modified_base 7..8: mod_base = OTHER; note = 2'-O-(2-methoxyethyl) ribonucleotide
  modified_base 9: mod_base = OTHER; note = Locked nucleic acid
  modified_base 10..11: mod_base = OTHER; note = 2'-O-(2-methoxyethyl) ribonucleotide
  modified_base 12: mod_base = OTHER; note = Locked nucleic acid
  modified_base 13..14: mod_base = OTHER; note = 2'-O-(2-methoxyethyl) ribonucleotide
  modified_base 15: mod_base = OTHER; note = Locked nucleic acid
  modified_base 16..17: mod_base = OTHER; note = 2'-O-(2-methoxyethyl) ribonucleotide
  modified_base 18: mod_base = OTHER; note = Locked nucleic acid
  modified_base 19..20: mod_base = OTHER; note = 2'-O-(2-methoxyethyl) ribonucleotide
  modified_base 7: mod_base = OTHER; note = 5-methyl cytidine
  modified_base 11: mod_base = OTHER; note = 5-methyl cytidine
  modified_base 16: mod_base = OTHER; note = 5-methyl cytidine
  modified_base 18: mod_base = OTHER; note = 5-methyl cytidine
gtggagcaaactaggcactg

SEQ ID NO: 498 - RNA, 20 nt, synthetic construct
  source 1..20: mol_type = other RNA
  modified_base 1..2: mod_base = OTHER; note = Phosphorothioate linkage
  modified_base 3..6: mod_base = OTHER; note = Phosphorothioate linkage
  modified_base 7..10: mod_base = OTHER; note = Phosphorothioate linkage
  modified_base 11..14: mod_base = OTHER; note = Phosphorothioate linkage
  modified_base 15..18: mod_base = OTHER; note = Phosphorothioate linkage
  modified_base 19..20: mod_base = OTHER; note = Phosphorothioate linkage
  modified_base 1..2: mod_base = OTHER; note = 2'-O-(2-methoxyethyl) ribonucleotide
  modified_base 3: mod_base = OTHER; note = Locked nucleic acid
  modified_base 4..5: mod_base = OTHER; note = 2'-O-(2-methoxyethyl) ribonucleotide
  modified_base 6: mod_base = OTHER; note = Locked nucleic acid
  modified_base 7..8: mod_base = OTHER; note = 2'-O-(2-methoxyethyl) ribonucleotide
  modified_base 9: mod_base = OTHER; note = Locked nucleic acid
  modified_base 10..11: mod_base = OTHER; note = 2'-O-(2-methoxyethyl) ribonucleotide
  modified_base 12: mod_base = OTHER; note = Locked nucleic acid
  modified_base 13..14: mod_base = OTHER; note = 2'-O-(2-methoxyethyl) ribonucleotide
  modified_base 15: mod_base = OTHER; note = Locked nucleic acid
  modified_base 16..17: mod_base = OTHER; note = 2'-O-(2-methoxyethyl) ribonucleotide
  modified_base 18: mod_base = OTHER; note = Locked nucleic acid
  modified_base 19..20: mod_base = OTHER; note = 2'-O-(2-methoxyethyl) ribonucleotide
  modified_base 7: mod_base = OTHER; note = 5-methyl cytidine
  modified_base 11: mod_base = OTHER; note = 5-methyl cytidine
  modified_base 16: mod_base = OTHER; note = 5-methyl cytidine
  modified_base 18: mod_base = OTHER; note = 5-methyl cytidine
gtggagcaaactaggcactg

SEQ ID NO: 499 - RNA, 20 nt, synthetic construct
  source 1..20: mol_type = other RNA
  modified_base 1..2: mod_base = OTHER; note = Phosphorothioate linkage
  modified_base 3..5: mod_base = OTHER; note = Phosphorothioate linkage
  modified_base 6..8: mod_base = OTHER; note = Phosphorothioate linkage
  modified_base 9..11: mod_base = OTHER; note = Phosphorothioate linkage
  modified_base 12..14: mod_base = OTHER; note = Phosphorothioate linkage
  modified_base 15..17: mod_base = OTHER; note = Phosphorothioate linkage
  modified_base 18..20: mod_base = OTHER; note = Phosphorothioate linkage
  modified_base 1..2: mod_base = OTHER; note = 2'-O-(2-methoxyethyl) ribonucleotide
  modified_base 3: mod_base = OTHER; note = Locked nucleic acid
  modified_base 4..5: mod_base = OTHER; note = 2'-O-(2-methoxyethyl) ribonucleotide
  modified_base 6: mod_base = OTHER; note = Locked nucleic acid
  modified_base 7..8: mod_base = OTHER; note = 2'-O-(2-methoxyethyl) ribonucleotide
  modified_base 9: mod_base = OTHER; note = Locked nucleic acid
  modified_base 10..11: mod_base = OTHER; note = 2'-O-(2-methoxyethyl) ribonucleotide
  modified_base 12: mod_base = OTHER; note = Locked nucleic acid
  modified_base 13..14: mod_base = OTHER; note = 2'-O-(2-methoxyethyl) ribonucleotide
  modified_base 15: mod_base = OTHER; note = Locked nucleic acid
  modified_base 16..17: mod_base = OTHER; note = 2'-O-(2-methoxyethyl) ribonucleotide
  modified_base 18: mod_base = OTHER; note = Locked nucleic acid
  modified_base 19..20: mod_base = OTHER; note = 2'-O-(2-methoxyethyl) ribonucleotide
  modified_base 7: mod_base = OTHER; note = 5-methyl cytidine
  modified_base 11: mod_base = OTHER; note = 5-methyl cytidine
  modified_base 16: mod_base = OTHER; note = 5-methyl cytidine
  modified_base 18: mod_base = OTHER; note = 5-methyl cytidine
gtggagcaaactaggcactg

SEQ ID NO: 500 - RNA, 20 nt, synthetic construct
  source 1..20: mol_type = other RNA
  modified_base 1..3: mod_base = OTHER; note = Phosphorothioate linkage
  modified_base 4..6: mod_base = OTHER; note = Phosphorothioate linkage
  modified_base 7..9: mod_base = OTHER; note = Phosphorothioate linkage
  modified_base 10..12: mod_base = OTHER; note = Phosphorothioate linkage
  modified_base 13..15: mod_base = OTHER; note = Phosphorothioate linkage
  modified_base 16..18: mod_base = OTHER; note = Phosphorothioate linkage
  modified_base 19..20: mod_base = OTHER; note = Phosphorothioate linkage
  modified_base 1..2: mod_base = OTHER; note = 2'-O-(2-methoxyethyl) ribonucleotide
  modified_base 3: mod_base = OTHER; note = Locked nucleic acid
  modified_base 4..5: mod_base = OTHER; note = 2'-O-(2-methoxyethyl) ribonucleotide
  modified_base 6: mod_base = OTHER; note = Locked nucleic acid
  modified_base 7..8: mod_base = OTHER; note = 2'-O-(2-methoxyethyl) ribonucleotide
  modified_base 9: mod_base = OTHER; note = Locked nucleic acid
  modified_base 10..11: mod_base = OTHER; note = 2'-O-(2-methoxyethyl) ribonucleotide
  modified_base 12: mod_base = OTHER; note = Locked nucleic acid
  modified_base 13..14: mod_base = OTHER; note = 2'-O-(2-methoxyethyl) ribonucleotide
  modified_base 15: mod_base = OTHER; note = Locked nucleic acid
  modified_base 16..17: mod_base = OTHER; note = 2'-O-(2-methoxyethyl) ribonucleotide
  modified_base 18: mod_base = OTHER; note = Locked nucleic acid
  modified_base 19..20: mod_base = OTHER; note = 2'-O-(2-methoxyethyl) ribonucleotide
  modified_base 7: mod_base = OTHER; note = 5-methyl cytidine
  modified_base 11: mod_base = OTHER; note = 5-methyl cytidine
  modified_base 16: mod_base = OTHER; note = 5-methyl cytidine
  modified_base 18: mod_base = OTHER; note = 5-methyl cytidine
gtggagcaaactaggcactg

SEQ ID NO: 501 - RNA, 20 nt, synthetic construct
  source 1..20: mol_type = other RNA
  modified_base 1..3: mod_base = OTHER; note = Phosphorothioate linkage
  modified_base 4..5: mod_base = OTHER; note = Phosphorothioate linkage
  modified_base 6..7: mod_base = OTHER; note = Phosphorothioate linkage
  modified_base 8..9: mod_base = OTHER; note = Phosphorothioate linkage
  modified_base 10..11: mod_base = OTHER; note = Phosphorothioate linkage
  modified_base 12..13: mod_base = OTHER; note = Phosphorothioate linkage
  modified_base 14..15: mod_base = OTHER; note = Phosphorothioate linkage
  modified_base 16..17: mod_base = OTHER; note = Phosphorothioate linkage
  modified_base 18..20: mod_base = OTHER; note = Phosphorothioate linkage
  modified_base 1..2: mod_base = OTHER; note = 2'-O-(2-methoxyethyl) ribonucleotide
  modified_base 3: mod_base = OTHER; note = Locked nucleic acid
  modified_base 4..5: mod_base = OTHER; note = 2'-O-(2-methoxyethyl) ribonucleotide
  modified_base 6: mod_base = OTHER; note = Locked nucleic acid
  modified_base 7..8: mod_base = OTHER; note = 2'-O-(2-methoxyethyl) ribonucleotide
  modified_base 9: mod_base = OTHER; note = Locked nucleic acid
  modified_base 10..11: mod_base = OTHER; note = 2'-O-(2-methoxyethyl) ribonucleotide
  modified_base 12: mod_base = OTHER; note = Locked nucleic acid
  modified_base 13..14: mod_base = OTHER; note = 2'-O-(2-methoxyethyl) ribonucleotide
  modified_base 15: mod_base = OTHER; note = Locked nucleic acid
  modified_base 16..17: mod_base = OTHER; note = 2'-O-(2-methoxyethyl) ribonucleotide
  modified_base 18: mod_base = OTHER; note = Locked nucleic acid
  modified_base 19..20: mod_base = OTHER; note = 2'-O-(2-methoxyethyl) ribonucleotide
  modified_base 7: mod_base = OTHER; note = 5-methyl cytidine
  modified_base 11: mod_base = OTHER; note = 5-methyl cytidine
  modified_base 16: mod_base = OTHER; note = 5-methyl cytidine
  modified_base 18: mod_base = OTHER; note = 5-methyl cytidine
gtggagcaaactaggcactg

SEQ ID NO: 502 - RNA, 20 nt, synthetic construct
  source 1..20: mol_type = other RNA
  modified_base 1..2: mod_base = OTHER; note = Phosphorothioate linkage
  modified_base 3..4: mod_base = OTHER; note = Phosphorothioate linkage
  modified_base 5..6: mod_base = OTHER; note = Phosphorothioate linkage
  modified_base 7..8: mod_base = OTHER; note = Phosphorothioate linkage
  modified_base 9..10: mod_base = OTHER; note = Phosphorothioate linkage
  modified_base 11..12: mod_base = OTHER; note = Phosphorothioate linkage
  modified_base 13..14: mod_base = OTHER; note = Phosphorothioate linkage
  modified_base 15..16: mod_base = OTHER; note = Phosphorothioate linkage
  modified_base 17..18: mod_base = OTHER; note = Phosphorothioate linkage
  modified_base 19..20: mod_base = OTHER; note = Phosphorothioate linkage
  modified_base 1..2: mod_base = OTHER; note = 2'-O-(2-methoxyethyl) ribonucleotide
  modified_base 3: mod_base = OTHER; note = Locked nucleic acid
  modified_base 4..5: mod_base = OTHER; note = 2'-O-(2-methoxyethyl) ribonucleotide
  modified_base 6: mod_base = OTHER; note = Locked nucleic acid
  modified_base 7..8: mod_base = OTHER; note = 2'-O-(2-methoxyethyl) ribonucleotide
  modified_base 9: mod_base = OTHER; note = Locked nucleic acid
  modified_base 10..11: mod_base = OTHER; note = 2'-O-(2-methoxyethyl) ribonucleotide
  modified_base 12: mod_base = OTHER; note = Locked nucleic acid
  modified_base 13..14: mod_base = OTHER; note = 2'-O-(2-methoxyethyl) ribonucleotide
  modified_base 15: mod_base = OTHER; note = Locked nucleic acid
  modified_base 16..17: mod_base = OTHER; note = 2'-O-(2-methoxyethyl) ribonucleotide
  modified_base 18: mod_base = OTHER; note = Locked nucleic acid
  modified_base 19..20: mod_base = OTHER; note = 2'-O-(2-methoxyethyl) ribonucleotide
  modified_base 7: mod_base = OTHER; note = 5-methyl cytidine
  modified_base 11: mod_base = OTHER; note = 5-methyl cytidine
  modified_base 16: mod_base = OTHER; note = 5-methyl cytidine
  modified_base 18: mod_base = OTHER; note = 5-methyl cytidine
gtggagcaaactaggcactg

SEQ ID NO: 503 - RNA, 20 nt, synthetic construct
  source 1..20: mol_type = other RNA
  modified_base 1..5: mod_base = OTHER; note = Phosphorothioate linkage
  modified_base 7..14: mod_base = OTHER; note = Phosphorothioate linkage
  modified_base 16..20: mod_base = OTHER; note = Phosphorothioate linkage
  modified_base 1..4: mod_base = OTHER; note = 2'-O-(2-methoxyethyl) ribonucleotide
  modified_base 5: mod_base = OTHER; note = Locked nucleic acid
  modified_base 6..9: mod_base = OTHER; note = 2'-O-(2-methoxyethyl) ribonucleotide
  modified_base 10: mod_base = OTHER; note = Locked nucleic acid
  modified_base 11..14: mod_base = OTHER; note = 2'-O-(2-methoxyethyl) ribonucleotide
  modified_base 15: mod_base = OTHER; note = Locked nucleic acid
  modified_base 16..20: mod_base = OTHER; note = 2'-O-(2-methoxyethyl) ribonucleotide
  modified_base 7: mod_base = OTHER; note = 5-methyl cytidine
  modified_base 11: mod_base = OTHER; note = 5-methyl cytidine
  modified_base 16: mod_base = OTHER; note = 5-methyl cytidine
  modified_base 18: mod_base = OTHER; note = 5-methyl cytidine
gtggagcaaactaggcactg

SEQ ID NO: 504 - RNA, 20 nt, synthetic construct
  source 1..20: mol_type = other RNA
  modified_base 1..4: mod_base = OTHER; note = Phosphorothioate linkage
  modified_base 5: mod_base = OTHER; note = Phosphorothioate linkage
  modified_base 6..9: mod_base = OTHER; note = Phosphorothioate linkage
  modified_base 10: mod_base = OTHER; note = Phosphorothioate linkage
  modified_base 11..14: mod_base = OTHER; note = Phosphorothioate linkage
  modified_base 17..20: mod_base = OTHER; note = Phosphorothioate linkage
  modified_base 1..4: mod_base = OTHER; note = 2'-O-(2-methoxyethyl) ribonucleotide
  modified_base 5: mod_base = OTHER; note = Locked nucleic acid
  modified_base 6..9: mod_base = OTHER; note = 2'-O-(2-methoxyethyl) ribonucleotide
  modified_base 10: mod_base = OTHER; note = Locked nucleic acid
  modified_base 11..14: mod_base = OTHER; note = 2'-O-(2-methoxyethyl) ribonucleotide
  modified_base 15: mod_base = OTHER; note = Locked nucleic acid
  modified_base 16..20: mod_base = OTHER; note = 2'-O-(2-methoxyethyl) ribonucleotide
  modified_base 7: mod_base = OTHER; note = 5-methyl cytidine
  modified_base 11: mod_base = OTHER; note = 5-methyl cytidine
  modified_base 16: mod_base = OTHER; note = 5-methyl cytidine
  modified_base 18: mod_base = OTHER; note = 5-methyl cytidine
gtggagcaaactaggcactg

SEQ ID NO: 505 - RNA, 20 nt, synthetic construct
  source 1..20: mol_type = other RNA
  modified_base 1..3: mod_base = OTHER; note = Phosphorothioate linkage
  modified_base 7..14: mod_base = OTHER; note = Phosphorothioate linkage
  modified_base 18..20: mod_base = OTHER; note = Phosphorothioate linkage
  modified_base 1..4: mod_base = OTHER; note = 2'-O-(2-methoxyethyl) ribonucleotide
  modified_base 5: mod_base = OTHER; note = Locked nucleic acid
  modified_base 6..9: mod_base = OTHER; note = 2'-O-(2-methoxyethyl) ribonucleotide
  modified_base 10: mod_base = OTHER; note = Locked nucleic acid
  modified_base 11..14: mod_base = OTHER; note = 2'-O-(2-methoxyethyl) ribonucleotide
  modified_base 15: mod_base = OTHER; note = Locked nucleic acid
  modified_base 16..20: mod_base = OTHER; note = 2'-O-(2-methoxyethyl) ribonucleotide
  modified_base 7: mod_base = OTHER; note = 5-methyl cytidine
  modified_base 11: mod_base = OTHER; note = 5-methyl cytidine
  modified_base 16: mod_base = OTHER; note = 5-methyl cytidine
  modified_base 18: mod_base = OTHER; note = 5-methyl cytidine
gtggagcaaactaggcactg

SEQ ID NO: 506 - RNA, 20 nt, synthetic construct
  source 1..20: mol_type = other RNA
  modified_base 1..2: mod_base = OTHER; note = Phosphorothioate linkage
  modified_base 7..14: mod_base = OTHER; note = Phosphorothioate linkage
  modified_base 19..20: mod_base = OTHER; note = Phosphorothioate linkage
  modified_base 1..4: mod_base = OTHER; note = 2'-O-(2-methoxyethyl) ribonucleotide
  modified_base 5: mod_base = OTHER; note = Locked nucleic acid
  modified_base 6..9: mod_base = OTHER; note = 2'-O-(2-methoxyethyl) ribonucleotide
  modified_base 10: mod_base = OTHER; note = Locked nucleic acid
  modified_base 11..14: mod_base = OTHER; note = 2'-O-(2-methoxyethyl) ribonucleotide
  modified_base 15: mod_base = OTHER; note = Locked nucleic acid
  modified_base 16..20: mod_base = OTHER; note = 2'-O-(2-methoxyethyl) ribonucleotide
  modified_base 7: mod_base = OTHER; note = 5-methyl cytidine
  modified_base 11: mod_base = OTHER; note = 5-methyl cytidine
  modified_base 16: mod_base = OTHER; note = 5-methyl cytidine
  modified_base 18: mod_base = OTHER; note = 5-methyl cytidine
gtggagcaaactaggcactg

SEQ ID NO: 507 - RNA, 20 nt, synthetic construct
  source 1..20: mol_type = other RNA
  modified_base 1..3: mod_base = OTHER; note = Phosphorothioate linkage
  modified_base 4..8: mod_base = OTHER; note = Phosphorothioate linkage
  modified_base 9..13: mod_base = OTHER; note = Phosphorothioate linkage
  modified_base 14..18: mod_base = OTHER; note = Phosphorothioate linkage
  modified_base 19..20: mod_base = OTHER; note = Phosphorothioate linkage
  modified_base 1..4: mod_base = OTHER; note = 2'-O-(2-methoxyethyl) ribonucleotide
  modified_base 5: mod_base = OTHER; note = Locked nucleic acid
  modified_base 6..9: mod_base = OTHER; note = 2'-O-(2-methoxyethyl) ribonucleotide
  modified_base 10: mod_base = OTHER; note = Locked nucleic acid
  modified_base 11..14: mod_base = OTHER; note = 2'-O-(2-methoxyethyl) ribonucleotide
  modified_base 15: mod_base = OTHER; note = Locked nucleic acid
  modified_base 16..20: mod_base = OTHER; note = 2'-O-(2-methoxyethyl) ribonucleotide
  modified_base 7: mod_base = OTHER; note = 5-methyl cytidine
  modified_base 11: mod_base = OTHER; note = 5-methyl cytidine
  modified_base 16: mod_base = OTHER; note = 5-methyl cytidine
  modified_base 18: mod_base = OTHER; note = 5-methyl cytidine
gtggagcaaactaggcactg

SEQ ID NO: 508 - RNA, 20 nt, synthetic construct
  source 1..20: mol_type = other RNA
  modified_base 1..4: mod_base = OTHER; note = Phosphorothioate linkage
  modified_base 5..8: mod_base = OTHER; note = Phosphorothioate linkage
  modified_base 9..12: mod_base = OTHER; note = Phosphorothioate linkage
  modified_base 13..16: mod_base = OTHER; note = Phosphorothioate linkage
  modified_base 17..20: mod_base = OTHER; note = Phosphorothioate linkage
  modified_base 1..4: mod_base = OTHER; note = 2'-O-(2-methoxyethyl) ribonucleotide
  modified_base 5: mod_base = OTHER; note = Locked nucleic acid
  modified_base 6..9: mod_base = OTHER; note = 2'-O-(2-methoxyethyl) ribonucleotide
  modified_base 10: mod_base = OTHER; note = Locked nucleic acid
  modified_base 11..14: mod_base = OTHER; note = 2'-O-(2-methoxyethyl) ribonucleotide
  modified_base 15: mod_base = OTHER; note = Locked nucleic acid
  modified_base 16..20: mod_base = OTHER; note = 2'-O-(2-methoxyethyl) ribonucleotide
  modified_base 7: mod_base = OTHER; note = 5-methyl cytidine
  modified_base 11: mod_base = OTHER; note = 5-methyl cytidine
  modified_base 16: mod_base = OTHER; note = 5-methyl cytidine
  modified_base 18: mod_base = OTHER; note = 5-methyl cytidine
gtggagcaaactaggcactg

SEQ ID NO: 509 - RNA, 20 nt, synthetic construct
  source 1..20: mol_type = other RNA
  modified_base 1..5: mod_base = OTHER; note = Phosphorothioate linkage
  modified_base 6..9: mod_base = OTHER; note = Phosphorothioate linkage
  modified_base 10..13: mod_base = OTHER; note = Phosphorothioate linkage
  modified_base 14..17: mod_base = OTHER; note = Phosphorothioate linkage
  modified_base 18..20: mod_base = OTHER; note = Phosphorothioate linkage
  modified_base 1..4: mod_base = OTHER; note = 2'-O-(2-methoxyethyl) ribonucleotide
  modified_base 5: mod_base = OTHER; note = Locked nucleic acid
  modified_base 6..9: mod_base = OTHER; note = 2'-O-(2-methoxyethyl) ribonucleotide
  modified_base 10: mod_base = OTHER; note = Locked nucleic acid
  modified_base 11..14: mod_base = OTHER; note = 2'-O-(2-methoxyethyl) ribonucleotide
  modified_base 15: mod_base = OTHER; note = Locked nucleic acid
  modified_base 16..20: mod_base = OTHER; note = 2'-O-(2-methoxyethyl) ribonucleotide
  modified_base 7: mod_base = OTHER; note = 5-methyl cytidine
  modified_base 11: mod_base = OTHER; note = 5-methyl cytidine
  modified_base 16: mod_base = OTHER; note = 5-methyl cytidine
  modified_base 18: mod_base = OTHER; note = 5-methyl cytidine
gtggagcaaactaggcactg

SEQ ID NO: 510 - RNA, 20 nt, synthetic construct
  source 1..20: mol_type = other RNA
  modified_base 1..2: mod_base = OTHER; note = Phosphorothioate linkage
  modified_base 3..6: mod_base = OTHER; note = Phosphorothioate linkage
  modified_base 7..10: mod_base = OTHER; note = Phosphorothioate linkage
  modified_base 11..14: mod_base = OTHER; note = Phosphorothioate linkage
  modified_base 15..18: mod_base = OTHER; note = Phosphorothioate linkage
  modified_base 19..20: mod_base = OTHER; note = Phosphorothioate linkage
  modified_base 1..4: mod_base = OTHER; note = 2'-O-(2-methoxyethyl) ribonucleotide
  modified_base 5: mod_base = OTHER; note = Locked nucleic acid
  modified_base 6..9: mod_base = OTHER; note = 2'-O-(2-methoxyethyl) ribonucleotide
  modified_base 10: mod_base = OTHER; note = Locked nucleic acid
  modified_base 11..14: mod_base = OTHER; note = 2'-O-(2-methoxyethyl) ribonucleotide
  modified_base 15: mod_base = OTHER; note = Locked nucleic acid
  modified_base 16..20: mod_base = OTHER; note = 2'-O-(2-methoxyethyl) ribonucleotide
  modified_base 7: mod_base = OTHER; note = 5-methyl cytidine
  modified_base 11: mod_base = OTHER; note = 5-methyl cytidine
  modified_base 16: mod_base = OTHER; note = 5-methyl cytidine
  modified_base 18: mod_base = OTHER; note = 5-methyl cytidine
gtggagcaaactaggcactg

SEQ ID NO: 511 - RNA, 20 nt, synthetic construct
  source 1..20: mol_type = other RNA
  modified_base 1..2: mod_base = OTHER; note = Phosphorothioate linkage
  modified_base 3..5: mod_base = OTHER; note = Phosphorothioate linkage
  modified_base 6..8: mod_base = OTHER; note = Phosphorothioate linkage
  modified_base 9..11: mod_base = OTHER; note = Phosphorothioate linkage
  modified_base 12..14: mod_base = OTHER; note = Phosphorothioate linkage
  modified_base 15..17: mod_base = OTHER; note = Phosphorothioate linkage
  modified_base 18..20: mod_base = OTHER; note = Phosphorothioate linkage
  modified_base 1..4: mod_base = OTHER; note = 2'-O-(2-methoxyethyl) ribonucleotide
  modified_base 5: mod_base = OTHER; note = Locked nucleic acid
  modified_base 6..9: mod_base = OTHER; note = 2'-O-(2-methoxyethyl) ribonucleotide
  modified_base 10: mod_base = OTHER; note = Locked nucleic acid
  modified_base 11..14: mod_base = OTHER; note = 2'-O-(2-methoxyethyl) ribonucleotide
  modified_base 15: mod_base = OTHER; note = Locked nucleic acid
  modified_base 16..20: mod_base = OTHER; note = 2'-O-(2-methoxyethyl) ribonucleotide
  modified_base 7: mod_base = OTHER; note = 5-methyl cytidine
  modified_base 11: mod_base = OTHER; note = 5-methyl cytidine
  modified_base 16: mod_base = OTHER; note = 5-methyl cytidine
  modified_base 18: mod_base = OTHER; note = 5-methyl cytidine
gtggagcaaactaggcactg

SEQ ID NO: 512 - RNA, 20 nt, synthetic construct
  source 1..20: mol_type = other RNA
  modified_base 1..3: mod_base = OTHER; note = Phosphorothioate linkage
  modified_base 4..6: mod_base = OTHER; note = Phosphorothioate linkage
  modified_base 7..9: mod_base = OTHER; note = Phosphorothioate linkage
  modified_base 10..12: mod_base = OTHER; note = Phosphorothioate linkage
  modified_base 13..15: mod_base = OTHER; note = Phosphorothioate linkage
  modified_base 16..18: mod_base = OTHER; note = Phosphorothioate linkage
  modified_base 19..20: mod_base = OTHER; note = Phosphorothioate linkage
  modified_base 1..4: mod_base = OTHER; note = 2'-O-(2-methoxyethyl) ribonucleotide
  modified_base 5: mod_base = OTHER; note = Locked nucleic acid
  modified_base 6..9: mod_base = OTHER; note = 2'-O-(2-methoxyethyl) ribonucleotide
  modified_base 10: mod_base = OTHER; note = Locked nucleic acid
  modified_base 11..14: mod_base = OTHER; note = 2'-O-(2-methoxyethyl) ribonucleotide
  modified_base 15: mod_base = OTHER; note = Locked nucleic acid
  modified_base 16..20: mod_base = OTHER; note = 2'-O-(2-methoxyethyl) ribonucleotide
  modified_base 7: mod_base = OTHER; note = 5-methyl cytidine
  modified_base 11: mod_base = OTHER; note = 5-methyl cytidine
  modified_base 16: mod_base = OTHER; note = 5-methyl cytidine
  modified_base 18: mod_base = OTHER; note = 5-methyl cytidine
gtggagcaaactaggcactg

SEQ ID NO: 513 - RNA, 20 nt, synthetic construct
  source 1..20: mol_type = other RNA
  modified_base 1..3: mod_base = OTHER; note = Phosphorothioate linkage
  modified_base 4..5: mod_base = OTHER; note = Phosphorothioate linkage
  modified_base 6..7: mod_base = OTHER; note = Phosphorothioate linkage
  modified_base 8..9: mod_base = OTHER; note = Phosphorothioate linkage
  modified_base 10..11: mod_base = OTHER; note = Phosphorothioate linkage
  modified_base 12..13: mod_base = OTHER; note = Phosphorothioate linkage
  modified_base 14..15: mod_base = OTHER; note = Phosphorothioate linkage
  modified_base 16..17: mod_base = OTHER; note = Phosphorothioate linkage
  modified_base 18..20: mod_base = OTHER; note = Phosphorothioate linkage
  modified_base 1..4: mod_base = OTHER; note = 2'-O-(2-methoxyethyl) ribonucleotide
  modified_base 5: mod_base = OTHER; note = Locked nucleic acid
  modified_base 6..9: mod_base = OTHER; note = 2'-O-(2-methoxyethyl) ribonucleotide
  modified_base 10: mod_base = OTHER; note = Locked nucleic acid
  modified_base 11..14: mod_base = OTHER; note = 2'-O-(2-methoxyethyl) ribonucleotide
  modified_base 15: mod_base = OTHER; note = Locked nucleic acid
  modified_base 16..20: mod_base = OTHER; note = 2'-O-(2-methoxyethyl) ribonucleotide
  modified_base 7: mod_base = OTHER; note = 5-methyl cytidine
  modified_base 11: mod_base = OTHER; note = 5-methyl cytidine
  modified_base 16: mod_base = OTHER; note = 5-methyl cytidine
  modified_base 18: mod_base = OTHER; note = 5-methyl cytidine
gtggagcaaactaggcactg

SEQ ID NO: 514 - RNA, 20 nt, synthetic construct
  source 1..20: mol_type = other RNA
  modified_base 1..2: mod_base = OTHER; note = Phosphorothioate linkage
  modified_base 3..4: mod_base = OTHER; note = Phosphorothioate linkage
  modified_base 5..6: mod_base = OTHER; note = Phosphorothioate linkage
  modified_base 7..8: mod_base = OTHER; note = Phosphorothioate linkage
  modified_base 9..10: mod_base = OTHER; note = Phosphorothioate linkage
  modified_base 11..12: mod_base = OTHER; note = Phosphorothioate linkage
  modified_base 13..14: mod_base = OTHER; note = Phosphorothioate linkage
  modified_base 15..16: mod_base = OTHER; note = Phosphorothioate linkage
  modified_base 17..18: mod_base = OTHER; note = Phosphorothioate linkage
  modified_base 19..20: mod_base = OTHER; note = Phosphorothioate linkage
  modified_base 1..4: mod_base = OTHER; note = 2'-O-(2-methoxyethyl) ribonucleotide
  modified_base 5: mod_base = OTHER; note = Locked nucleic acid
  modified_base 6..9: mod_base = OTHER; note = 2'-O-(2-methoxyethyl) ribonucleotide
  modified_base 10: mod_base = OTHER; note = Locked nucleic acid
  modified_base 11..14: mod_base = OTHER; note = 2'-O-(2-methoxyethyl) ribonucleotide
  modified_base 15: mod_base = OTHER; note = Locked nucleic acid
  modified_base 16..20: mod_base = OTHER; note = 2'-O-(2-methoxyethyl) ribonucleotide
  modified_base 7: mod_base = OTHER; note = 5-methyl cytidine
  modified_base 11: mod_base = OTHER; note = 5-methyl cytidine
  modified_base 16: mod_base = OTHER; note = 5-methyl cytidine
  modified_base 18: mod_base = OTHER; note = 5-methyl cytidine
gtggagcaaactaggcactg

SEQ ID NO: 515 - RNA, 20 nt, synthetic construct
  source 1..20: mol_type = other RNA
  modified_base 1..3: mod_base = OTHER; note = Phosphorothioate linkage
  modified_base 4..8: mod_base = OTHER; note = Phosphorothioate linkage
  modified_base 9..13: mod_base = OTHER; note = Phosphorothioate linkage
  modified_base 14..18: mod_base = OTHER; note = Phosphorothioate linkage
  modified_base 19..20: mod_base = OTHER; note = Phosphorothioate linkage
  modified_base 1..20: mod_base = OTHER; note = 2'-O-(2-methoxyethyl) ribonucleotide
  modified_base 7: mod_base = OTHER; note = 5-methyl cytidine
  modified_base 14: mod_base = OTHER; note = 5-methyl cytidine
tgttttgcttggtcaagagg

SEQ ID NO: 516 - RNA, 20 nt, synthetic construct
  source 1..20: mol_type = other RNA
  modified_base 1..20: mod_base = OTHER; note = Phosphorothioate linkage
  modified_base 1..20: mod_base = OTHER; note = 2'-O-(2-methoxyethyl) ribonucleotide
  modified_base 7: mod_base = OTHER; note = 5-methyl cytidine
  modified_base 10: mod_base = OTHER; note = 5-methyl cytidine
  modified_base 20: mod_base = OTHER; note = 5-methyl cytidine
gtgaggcatcaggtaagttc

SEQ ID NO: 517 - RNA, 20 nt, synthetic construct
  source 1..20: mol_type = other RNA
  modified_base 1..3: mod_base = OTHER; note = Phosphorothioate linkage
  modified_base 4..6: mod_base = OTHER; note = Phosphorothioate linkage
  modified_base 7..9: mod_base = OTHER; note = Phosphorothioate linkage
  modified_base 10..12: mod_base = OTHER; note = Phosphorothioate linkage
  modified_base 13..15: mod_base = OTHER; note = Phosphorothioate linkage
  modified_base 16..18: mod_base = OTHER; note = Phosphorothioate linkage
  modified_base 19..20: mod_base = OTHER; note = Phosphorothioate linkage
  modified_base 1..20: mod_base = OTHER; note = 2'-O-(2-methoxyethyl) ribonucleotide
  modified_base 7: mod_base = OTHER; note = 5-methyl cytidine
  modified_base 10: mod_base = OTHER; note = 5-methyl cytidine
  modified_base 20: mod_base = OTHER; note = 5-methyl cytidine
gtgaggcatcaggtaagttc

SEQ ID NO: 518 - RNA, 20 nt, synthetic construct
  source 1..20: mol_type = other RNA
  modified_base 1..3: mod_base = OTHER; note = Phosphorothioate linkage
  modified_base 4..5: mod_base = OTHER; note = Phosphorothioate linkage
  modified_base 6..7: mod_base = OTHER; note = Phosphorothioate linkage
  modified_base 8..9: mod_base = OTHER; note = Phosphorothioate linkage
  modified_base 10..11: mod_base = OTHER; note = Phosphorothioate linkage
  modified_base 12..13: mod_base = OTHER; note = Phosphorothioate linkage
  modified_base 14..15: mod_base = OTHER; note = Phosphorothioate linkage
  modified_base 16..17: mod_base = OTHER; note = Phosphorothioate linkage
  modified_base 18..20: mod_base = OTHER; note = Phosphorothioate linkage
  modified_base 1..20: mod_base = OTHER; note = 2'-O-(2-methoxyethyl) ribonucleotide
  modified_base 7: mod_base = OTHER; note = 5-methyl cytidine
  modified_base 10: mod_base = OTHER; note = 5-methyl cytidine
  modified_base 20: mod_base = OTHER; note = 5-methyl cytidine
gtgaggcatcaggtaagttc

SEQ ID NO: 519 - RNA, 20 nt, synthetic construct
  source 1..20: mol_type = other RNA
  modified_base 1..5: mod_base = OTHER; note = Phosphorothioate linkage
  modified_base 7..14: mod_base = OTHER; note = Phosphorothioate linkage
  modified_base 16..20: mod_base = OTHER; note = Phosphorothioate linkage
  modified_base 1..20: mod_base = OTHER; note = 2'-O-(2-methoxyethyl) ribonucleotide
  modified_base 7: mod_base = OTHER; note = 5-methyl cytidine
  modified_base 10: mod_base = OTHER; note = 5-methyl cytidine
  modified_base 20: mod_base = OTHER; note = 5-methyl cytidine
gtgaggcatcaggtaagttc

SEQ ID NO: 520 - RNA, 20 nt, synthetic construct
  source 1..20: mol_type = other RNA
  modified_base 1..4: mod_base = OTHER; note = Phosphorothioate linkage
  modified_base 7..14: mod_base = OTHER; note = Phosphorothioate linkage
  modified_base 17..20: mod_base = OTHER; note = Phosphorothioate linkage
  modified_base 1..20: mod_base = OTHER; note = 2'-O-(2-methoxyethyl) ribonucleotide
  modified_base 7: mod_base = OTHER; note = 5-methyl cytidine
  modified_base 10: mod_base = OTHER; note = 5-methyl cytidine
  modified_base 20: mod_base = OTHER; note = 5-methyl cytidine
gtgaggcatcaggtaagttc

SEQ ID NO: 521 - RNA, 20 nt, synthetic construct
  source 1..20: mol_type = other RNA
  modified_base 1..3: mod_base = OTHER; note = Phosphorothioate linkage
  modified_base 7..14: mod_base = OTHER; note = Phosphorothioate linkage
  modified_base 18..20: mod_base = OTHER; note = Phosphorothioate linkage
  modified_base 1..20: mod_base = OTHER; note = 2'-O-(2-methoxyethyl) ribonucleotide
  modified_base 7: mod_base = OTHER; note = 5-methyl cytidine
  modified_base 10: mod_base = OTHER; note = 5-methyl cytidine
  modified_base 20: mod_base = OTHER; note = 5-methyl cytidine
gtgaggcatcaggtaagttc

SEQ ID NO: 522 - RNA, 20 nt, synthetic construct
  source 1..20: mol_type = other RNA
  modified_base 1..2: mod_base = OTHER; note = Phosphorothioate linkage
  modified_base 7..14: mod_base = OTHER; note = Phosphorothioate linkage
  modified_base 19..20: mod_base = OTHER; note = Phosphorothioate linkage
  modified_base 1..20: mod_base = OTHER; note = 2'-O-(2-methoxyethyl) ribonucleotide
  modified_base 7: mod_base = OTHER; note = 5-methyl cytidine
  modified_base 10: mod_base = OTHER; note = 5-methyl cytidine
  modified_base 20: mod_base = OTHER; note = 5-methyl cytidine
gtgaggcatcaggtaagttc

SEQ ID NO: 523 - RNA, 20 nt, synthetic construct
  source 1..20: mol_type = other RNA
  modified_base 1..3: mod_base = OTHER; note = Phosphorothioate linkage
  modified_base 4..8: mod_base = OTHER; note = Phosphorothioate linkage
  modified_base 9..13: mod_base = OTHER; note = Phosphorothioate linkage
  modified_base 14..18: mod_base = OTHER; note = Phosphorothioate linkage
  modified_base 19..20: mod_base = OTHER; note = Phosphorothioate linkage
  modified_base 1..20: mod_base = OTHER; note = 2'-O-(2-methoxyethyl) ribonucleotide
  modified_base 7: mod_base = OTHER; note = 5-methyl cytidine
  modified_base 10: mod_base = OTHER; note = 5-methyl cytidine
  modified_base 20: mod_base = OTHER; note = 5-methyl cytidine
gtgaggcatcaggtaagttc

SEQ ID NO: 524 - RNA, 20 nt, synthetic construct
  source 1..20: mol_type = other RNA
  modified_base 1..4: mod_base = OTHER; note = Phosphorothioate linkage
  modified_base 5..8: mod_base = OTHER; note = Phosphorothioate linkage
  modified_base 9..12: mod_base = OTHER; note = Phosphorothioate linkage
  modified_base 13..16: mod_base = OTHER; note = Phosphorothioate linkage
  modified_base 17..20: mod_base = OTHER; note = Phosphorothioate linkage
  modified_base 1..20: mod_base = OTHER; note = 2'-O-(2-methoxyethyl) ribonucleotide
  modified_base 7: mod_base = OTHER; note = 5-methyl cytidine
  modified_base 10: mod_base = OTHER; note = 5-methyl cytidine
  modified_base 20: mod_base = OTHER; note = 5-methyl cytidine
gtgaggcatcaggtaagttc

SEQ ID NO: 525 - RNA, 20 nt, synthetic construct
  source 1..20: mol_type = other RNA
  modified_base 1..5: mod_base = OTHER; note = Phosphorothioate linkage
  modified_base 6..9: mod_base = OTHER; note = Phosphorothioate linkage
  modified_base 10..13: mod_base = OTHER; note = Phosphorothioate linkage
  modified_base 14..17: mod_base = OTHER; note = Phosphorothioate linkage
  modified_base 18..20: mod_base = OTHER; note = Phosphorothioate linkage
  modified_base 1..20: mod_base = OTHER; note = 2'-O-(2-methoxyethyl) ribonucleotide
  modified_base 7: mod_base = OTHER; note = 5-methyl cytidine
  modified_base 10: mod_base = OTHER; note = 5-methyl cytidine
  modified_base 20: mod_base = OTHER; note = 5-methyl cytidine
gtgaggcatcaggtaagttc

SEQ ID NO: 526 - RNA, 20 nt, synthetic construct
  source 1..20: mol_type = other RNA
  modified_base 1..2: mod_base = OTHER; note = Phosphorothioate linkage
  modified_base 3..6: mod_base = OTHER; note = Phosphorothioate linkage
  modified_base 7..10: mod_base = OTHER; note = Phosphorothioate linkage
  modified_base 11..13: mod_base = OTHER; note = Phosphorothioate linkage
  modified_base 14..17: mod_base = OTHER; note = Phosphorothioate linkage
  modified_base 19..20: mod_base = OTHER; note = Phosphorothioate linkage
  modified_base 1..20: mod_base = OTHER; note = 2'-O-(2-methoxyethyl) ribonucleotide
  modified_base 7: mod_base = OTHER; note = 5-methyl cytidine
  modified_base 10: mod_base = OTHER; note = 5-methyl cytidine
  modified_base 20: mod_base = OTHER; note = 5-methyl cytidine
gtgaggcatcaggtaagttc

SEQ ID NO: 527 - RNA, 20 nt, synthetic construct
  source 1..20: mol_type = other RNA
  modified_base 1..2: mod_base = OTHER; note = Phosphorothioate linkage
  modified_base 3..5: mod_base = OTHER; note = Phosphorothioate linkage
  modified_base 6..8: mod_base = OTHER; note = Phosphorothioate linkage
  modified_base 9..11: mod_base = OTHER; note = Phosphorothioate linkage
  modified_base 12..14: mod_base = OTHER; note = Phosphorothioate linkage
  modified_base 15..17: mod_base = OTHER; note = Phosphorothioate linkage
  modified_base 18..20: mod_base = OTHER; note = Phosphorothioate linkage
  modified_base 1..20: mod_base = OTHER; note = 2'-O-(2-methoxyethyl) ribonucleotide
  modified_base 7: mod_base = OTHER; note = 5-methyl cytidine
  modified_base 10: mod_base = OTHER; note = 5-methyl cytidine
  modified_base 20: mod_base = OTHER; note = 5-methyl cytidine
gtgaggcatcaggtaagttc

SEQ ID NO: 528 - RNA, 20 nt, synthetic construct
  source 1..20: mol_type = other RNA
  modified_base 1..2: mod_base = OTHER; note = Phosphorothioate linkage
  modified_base 3..4: mod_base = OTHER; note = Phosphorothioate linkage
  modified_base 5..6: mod_base = OTHER; note = Phosphorothioate linkage
  modified_base 7..8: mod_base = OTHER; note = Phosphorothioate linkage
  modified_base 9..10: mod_base = OTHER; note = Phosphorothioate linkage
  modified_base 11..12: mod_base = OTHER; note = Phosphorothioate linkage
  modified_base 13..14: mod_base = OTHER; note = Phosphorothioate linkage
  modified_base 15..16: mod_base = OTHER; note = Phosphorothioate linkage
  modified_base 17..18: mod_base = OTHER; note = Phosphorothioate linkage
  modified_base 19..20: mod_base = OTHER; note = Phosphorothioate linkage
  modified_base 1..20: mod_base = OTHER; note = 2'-O-(2-methoxyethyl) ribonucleotide
  modified_base 7: mod_base = OTHER; note = 5-methyl cytidine
  modified_base 10: mod_base = OTHER; note = 5-methyl cytidine
  modified_base 20: mod_base = OTHER; note = 5-methyl cytidine
gtgaggcatcaggtaagttc

SEQ ID NO: 529 - DNA, 21 bp, synthetic construct
  source 1..21: mol_type = other DNA
  modified_base 1..21: mod_base = OTHER; note = Phosphorothioate linkage
  modified_base 1..5: mod_base = OTHER; note = 2'-O-(2-methoxyethyl) ribonucleotide
  misc_feature 1..5: note = RNA
  misc_feature 6..16: note = DNA
  misc_feature 17..21: note = RNA
  modified_base 17..21: mod_base = OTHER; note = 2'-O-(2-methoxyethyl) ribonucleotide
  modified_base 4: mod_base = OTHER; note = 5-methyl cytidine
  modified_base 7..9: mod_base = OTHER; note = 5-methyl cytidine
  modified_base 17: mod_base = OTHER; note = 5-methyl cytidine
  modified_base 21: mod_base = OTHER; note = 5-methyl cytidine
tagctaccctttgtttctggc

SEQ ID NO: 530 - DNA, 20 bp, synthetic construct
  source 1..20: mol_type = other DNA
  modified_base 1..20: mod_base = OTHER; note = Phosphorothioate linkage
  modified_base 1..5: mod_base = OTHER; note = 2'-O-(2-methoxyethyl) ribonucleotide
  misc_feature 1..5: note = RNA
  misc_feature 6..15: note = DNA
  misc_feature 16..20: note = RNA
  modified_base 16..20: mod_base = OTHER; note = 2'-O-(2-methoxyethyl) ribonucleotide
  modified_base 3: mod_base = OTHER; note = 5-methyl cytidine
  modified_base 5: mod_base = OTHER; note = 5-methyl cytidine
  modified_base 7: mod_base = OTHER; note = 5-methyl cytidine
  modified_base 10: mod_base = OTHER; note = 5-methyl cytidine
  modified_base 13: mod_base = OTHER; note = 5-methyl cytidine
  modified_base 16..17: mod_base = OTHER; note = 5-methyl cytidine
  modified_base 20: mod_base = OTHER; note = 5-methyl cytidine
gacacacagcatcaaccgac

SEQ ID NO: 531 - DNA, 20 bp, synthetic construct
  source 1..20: mol_type = other DNA
  modified_base 1..20: mod_base = OTHER; note = Phosphorothioate linkage
  modified_base 1..5: mod_base = OTHER; note = 2'-O-(2-methoxyethyl) ribonucleotide
  misc_feature 1..5: note = RNA
  misc_feature 6..15: note = DNA
  misc_feature 16..20: note = RNA
  modified_base 16..20: mod_base = OTHER; note = 2'-O-(2-methoxyethyl) ribonucleotide
  modified_base 4: mod_base = OTHER; note = 5-methyl cytidine
  modified_base 7..8: mod_base = OTHER; note = 5-methyl cytidine
  modified_base 13..15: mod_base = OTHER; note = 5-methyl cytidine
  modified_base 17: mod_base = OTHER; note = 5-methyl cytidine
tatcagccatagccctcagg

SEQ ID NO: 532 - DNA, 20 bp, synthetic construct
  source 1..20: mol_type = other DNA
  modified_base 1..20: mod_base = OTHER; note = Phosphorothioate linkage
  modified_base 1..5: mod_base = OTHER; note = 2'-O-(2-methoxyethyl) ribonucleotide
  misc_feature 1..5: note = RNA
  misc_feature 6..15: note = DNA
  misc_feature 16..20: note = RNA
  modified_base 16..20: mod_base = OTHER; note = 2'-O-(2-methoxyethyl) ribonucleotide
  modified_base 1..2: mod_base = OTHER; note = 5-methyl cytidine
  modified_base 4: mod_base = OTHER; note = 5-methyl cytidine
  modified_base 7: mod_base = OTHER; note = 5-methyl cytidine
  modified_base 12..13: mod_base = OTHER; note = 5-methyl cytidine
  modified_base 15: mod_base = OTHER; note = 5-methyl cytidine
cctcaacggtgcctctgaag

SEQ ID NO: 533 - DNA, 20 bp, synthetic construct
  source 1..20: mol_type = other DNA
  modified_base 1..20: mod_base = OTHER; note = Phosphorothioate linkage
  modified_base 1..5: mod_base = OTHER; note = 2'-O-(2-methoxyethyl) ribonucleotide
  misc_feature 1..5: note = RNA
  misc_feature 6..15: note = DNA
  misc_feature 16..20: note = RNA
  modified_base 16..20: mod_base = OTHER; note = 2'-O-(2-methoxyethyl) ribonucleotide
  modified_base 1: mod_base = OTHER; note = 5-methyl cytidine
  modified_base 12: mod_base = OTHER; note = 5-methyl cytidine
  modified_base 16: mod_base = OTHER; note = 5-methyl cytidine
ctttggtgttacattctgtt

SEQ ID NO: 534 - DNA, 20 bp, synthetic construct
  source 1..20: mol_type = other DNA
  modified_base 1..20: mod_base = OTHER; note = Phosphorothioate linkage
  modified_base 1..5: mod_base = OTHER; note = 2'-O-(2-methoxyethyl) ribonucleotide
  misc_feature 1..5: note = RNA
  misc_feature 6..15: note = DNA
  misc_feature 16..20: note = RNA
  modified_base 16..20: mod_base = OTHER; note = 2'-O-(2-methoxyethyl) ribonucleotide
  modified_base 3..4: mod_base = OTHER; note = 5-methyl cytidine
  modified_base 13..15: mod_base = OTHER; note = 5-methyl cytidine
tgccataaaatgcccaagtt

SEQ ID NO: 535 - DNA, 20 bp, synthetic construct
  source 1..20: mol_type = other DNA
  modified_base 1..20: mod_base = OTHER; note = Phosphorothioate linkage
  modified_base 1..5: mod_base = OTHER; note = 2'-O-(2-methoxyethyl) ribonucleotide
  misc_feature 1..5: note = RNA
  misc_feature 6..15: note = DNA
  misc_feature 16..20: note = RNA
  modified_base 16..20: mod_base = OTHER; note = 2'-O-(2-methoxyethyl) ribonucleotide
  modified_base 6: mod_base = OTHER; note = 5-methyl cytidine
  modified_base 10..13: mod_base = OTHER; note = 5-methyl cytidine
gattgcaagccccttgaata

SEQ ID NO: 536 - RNA, 20 nt, synthetic construct
  source 1..20: mol_type = other RNA
  modified_base 1..20: mod_base = OTHER; note = Phosphorothioate linkage
  modified_base 1..5: mod_base = OTHER; note = 2'-O-(2-methoxyethyl) ribonucleotide
  misc_feature 1..5: note = RNA
  misc_feature 6..15: note = DNA
  misc_feature 16..20: note = RNA
  modified_base 16..20: mod_base = OTHER; note = 2'-O-(2-methoxyethyl) ribonucleotide
  modified_base 6: mod_base = OTHER; note = 5-methyl cytidine
  modified_base 8: mod_base = OTHER; note = 5-methyl cytidine
  modified_base 10..11: mod_base = OTHER; note = 5-methyl cytidine
  modified_base 13..16: mod_base = OTHER; note = 5-methyl cytidine
  modified_base 18: mod_base = OTHER; note = 5-methyl cytidine
  modified_base 20: mod_base = OTHER; note = 5-methyl cytidine
gtttacactccaccccactc

SEQ ID NO: 537 - DNA, 20 bp, synthetic construct
  source 1..20: mol_type = other DNA
  modified_base 1..20: mod_base = OTHER; note = Phosphorothioate linkage
  modified_base 1..5: mod_base = OTHER; note = 2'-O-(2-methoxyethyl) ribonucleotide
  misc_feature 1..5: note = RNA
  misc_feature 6..15: note = DNA
  misc_feature 16..20: note = RNA
  modified_base 16..20: mod_base = OTHER; note = 2'-O-(2-methoxyethyl) ribonucleotide
  modified_base 1..2: mod_base = OTHER; note = 5-methyl cytidine
  modified_base 4..5: mod_base = OTHER; note = 5-methyl cytidine
  modified_base 10..12: mod_base = OTHER; note = 5-methyl cytidine
  modified_base 16: mod_base = OTHER; note = 5-methyl cytidine
cctccatttccctgtctagg

SEQ ID NO: 538 - DNA, 20 bp, synthetic construct
  source 1..20: mol_type = other DNA
  modified_base 1..20: mod_base = OTHER; note = Phosphorothioate linkage
  modified_base 1..5: mod_base = OTHER; note = 2'-O-(2-methoxyethyl) ribonucleotide
  misc_feature 1..5: note = RNA
  misc_feature 6..15: note = DNA
  misc_feature 16..20: note = RNA
  modified_base 16..20: mod_base = OTHER; note = 2'-O-(2-methoxyethyl) ribonucleotide
  modified_base 1: mod_base = OTHER; note = 5-methyl cytidine
  modified_base 3: mod_base = OTHER; note = 5-methyl cytidine
  modified_base 13: mod_base = OTHER; note = 5-methyl cytidine
  modified_base 15: mod_base = OTHER; note = 5-methyl cytidine
cactgtgattgtctctggtt

SEQ ID NO: 539 - DNA, 20 bp, synthetic construct
  source 1..20: mol_type = other DNA
  modified_base 1..20: mod_base = OTHER; note = Phosphorothioate linkage
  modified_base 1..5: mod_base = OTHER; note = 2'-O-(2-methoxyethyl) ribonucleotide
  misc_feature 1..5: note = RNA
  misc_feature 6..15: note = DNA
  misc_feature 16..20: note = RNA
  modified_base 16..20: mod_base = OTHER; note = 2'-O-(2-methoxyethyl) ribonucleotide
  modified_base 2: mod_base = OTHER; note = 5-methyl cytidine
gctttttagagatgttagag

SEQ ID NO: 540 - DNA, 20 bp, synthetic construct
  source 1..20: mol_type = other DNA
  modified_base 1..20: mod_base = OTHER; note = Phosphorothioate linkage
  modified_base 1..5: mod_base = OTHER; note = 2'-O-(2-methoxyethyl) ribonucleotide
  misc_feature 1..5: note = RNA
  misc_feature 6..15: note = DNA
  misc_feature 16..20: note = RNA
  modified_base 16..20: mod_base = OTHER; note = 2'-O-(2-methoxyethyl) ribonucleotide
  modified_base 7: mod_base = OTHER; note = 5-methyl cytidine
  modified_base 9: mod_base = OTHER; note = 5-methyl cytidine
  modified_base 16: mod_base = OTHER; note = 5-methyl cytidine
gggagtcacatattgctaat

SEQ ID NO: 541 - DNA, 20 bp, synthetic construct
  source 1..20: mol_type = other DNA
  modified_base 1..20: mod_base = OTHER; note = Phosphorothioate linkage
  modified_base 1..5: mod_base = OTHER; note = 2'-O-(2-methoxyethyl) ribonucleotide
  misc_feature 1..5: note = RNA
  misc_feature 6..15: note = DNA
  misc_feature 16..20: note = RNA
  modified_base 16..20: mod_base = OTHER; note = 2'-O-(2-methoxyethyl) ribonucleotide
  modified_base 17: mod_base = OTHER; note = 5-methyl cytidine
gggagaaagtttgtttctag

SEQ ID NO: 542 - DNA, 20 bp, synthetic construct
  source 1..20: mol_type = other DNA
  modified_base 1..20: mod_base = OTHER; note = Phosphorothioate linkage
  modified_base 1..5: mod_base = OTHER; note = 2'-O-(2-methoxyethyl) ribonucleotide
  misc_feature 1..5: note = RNA
  misc_feature 6..15: note = DNA
  misc_feature 16..20: note = RNA
  modified_base 16..20: mod_base = OTHER; note = 2'-O-(2-methoxyethyl) ribonucleotide
  modified_base 1: mod_base = OTHER; note = 5-methyl cytidine
  modified_base 6: mod_base = OTHER; note = 5-methyl cytidine
  modified_base 9: mod_base = OTHER; note = 5-methyl cytidine
  modified_base 15..17: mod_base = OTHER; note = 5-methyl cytidine
catttcttcattgtcccggt

SEQ ID NO: 543 - DNA, 20 bp, synthetic construct
  source 1..20: mol_type = other DNA
  modified_base 1..20: mod_base = OTHER; note = Phosphorothioate linkage
  modified_base 1..5: mod_base = OTHER; note = 2'-O-(2-methoxyethyl) ribonucleotide
  misc_feature 1..5: note = RNA
  misc_feature 6..15: note = DNA
  misc_feature 16..20: note = RNA
  modified_base 16..20: mod_base = OTHER; note = 2'-O-(2-methoxyethyl) ribonucleotide
  modified_base 4: mod_base = OTHER; note = 5-methyl cytidine
  modified_base 9: mod_base = OTHER; note = 5-methyl cytidine
  modified_base 11..12: mod_base = OTHER; note = 5-methyl cytidine
  modified_base 15: mod_base = OTHER; note = 5-methyl cytidine
  modified_base 17..18: mod_base = OTHER; note = 5-methyl cytidine
tatcttttctccaacaccgt

SEQ ID NO: 544 - DNA, 20 bp, synthetic construct
  source 1..20: mol_type = other DNA
  modified_base 1..20: mod_base = OTHER; note = Phosphorothioate linkage
  modified_base 1..5: mod_base = OTHER; note = 2'-O-(2-methoxyethyl) ribonucleotide
  misc_feature 1..5: note = RNA
  misc_feature 6..15: note = DNA
  misc_feature 16..20: note = RNA
  modified_base 16..20: mod_base = OTHER; note = 2'-O-(2-methoxyethyl) ribonucleotide
  modified_base 6: mod_base = OTHER; note = 5-methyl cytidine
  modified_base 7..8: mod_base = OTHER; note = 5-methyl cytidine
  modified_base 11: mod_base = OTHER; note = 5-methyl cytidine
  modified_base 16..17: mod_base = OTHER; note = 5-methyl cytidine
  modified_base 20: mod_base = OTHER; note = 5-methyl cytidine
taatgcagaactacaccgac

SEQ ID NO: 545 - DNA, 20 bp, synthetic construct
  source 1..20: mol_type = other DNA
  modified_base 1..20: mod_base = OTHER; note = Phosphorothioate linkage
  modified_base 1..5: mod_base = OTHER; note = 2'-O-(2-methoxyethyl) ribonucleotide
  misc_feature 1..5: note = RNA
  misc_feature 6..15: note = DNA
  misc_feature 16..20: note = RNA
  modified_base 16..20: mod_base = OTHER; note = 2'-O-(2-methoxyethyl) ribonucleotide
  modified_base 3: mod_base = OTHER; note = 5-methyl cytidine
  modified_base 6..8: mod_base = OTHER; note = 5-methyl cytidine
  modified_base 16: mod_base = OTHER; note = 5-methyl cytidine
ttctacccttgaaagctggt

SEQ ID NO: 546 - DNA, 20 bp, synthetic construct
  source 1..20: mol_type = other DNA
  modified_base 1..20: mod_base = OTHER; note = Phosphorothioate linkage
  modified_base 1..5: mod_base = OTHER; note = 2'-O-(2-methoxyethyl) ribonucleotide
  misc_feature 1..5: note = RNA
  misc_feature 6..15: note = DNA
  misc_feature 16..20: note = RNA
  modified_base 16..20: mod_base = OTHER; note = 2'-O-(2-methoxyethyl) ribonucleotide
  modified_base 2: mod_base = OTHER; note = 5-methyl cytidine
  modified_base 4: mod_base = OTHER; note = 5-methyl cytidine
  modified_base 9: mod_base = OTHER; note = 5-methyl cytidine
  modified_base 16: mod_base = OTHER; note = 5-methyl cytidine
  modified_base 18: mod_base = OTHER; note = 5-methyl cytidine
gcacaattctgtttgctctg

SEQ ID NO: 547 - DNA, 20 bp, synthetic construct
  source 1..20: mol_type = other DNA
  modified_base 1..20: mod_base = OTHER; note = Phosphorothioate linkage
  modified_base 1..5: mod_base = OTHER; note = 2'-O-(2-methoxyethyl) ribonucleotide
  misc_feature 1..5: note = RNA
  misc_feature 6..15: note = DNA
  misc_feature 16..20: note = RNA
  modified_base 16..20: mod_base = OTHER; note = 2'-O-(2-methoxyethyl) ribonucleotide
  modified_base 9: mod_base = OTHER; note = 5-methyl cytidine
  modified_base 16..17: mod_base = OTHER; note = 5-methyl cytidine
gtgtggtacaaatggccgaa

SEQ ID NO: 548 - DNA, 20 bp, synthetic construct
  source 1..20: mol_type = other DNA
  modified_base 1..20: mod_base = OTHER; note = Phosphorothioate linkage
  modified_base 1..5: mod_base = OTHER; note = 2'-O-(2-methoxyethyl) ribonucleotide
  misc_feature 1..5: note = RNA
  misc_feature 6..15: note = DNA
  misc_feature 16..20: note = RNA
  modified_base 16..20: mod_base = OTHER; note = 2'-O-(2-methoxyethyl) ribonucleotide
  modified_base 19: mod_base = OTHER; note = 5-methyl cytidine
gagagagagagtggtgtaca

SEQ ID NO: 549 - DNA, 20 bp, synthetic construct
  source 1..20: mol_type = other DNA
  modified_base 1..20: mod_base = OTHER; note = Phosphorothioate linkage
  modified_base 1..5: mod_base = OTHER; note = 2'-O-(2-methoxyethyl) ribonucleotide
  misc_feature 1..5: note = RNA
  misc_feature 6..15: note = DNA
  misc_feature 16..20: note = RNA
  modified_base 16..20: mod_base = OTHER; note = 2'-O-(2-methoxyethyl) ribonucleotide
  modified_base 1: mod_base = OTHER; note = 5-methyl cytidine
  modified_base 6: mod_base = OTHER; note = 5-methyl cytidine
  modified_base 13: mod_base = OTHER; note = 5-methyl cytidine
  modified_base 15: mod_base = OTHER; note = 5-methyl cytidine
caatacagatgactcttggt

SEQ ID NO: 550 - DNA, 20 bp, synthetic construct
  source 1..20: mol_type = other DNA
  modified_base 1..20: mod_base = OTHER; note = Phosphorothioate linkage
  modified_base 1..5: mod_base = OTHER; note = 2'-O-(2-methoxyethyl) ribonucleotide
  misc_feature 1..5: note = RNA
  misc_feature 6..15: note = DNA
  misc_feature 16..20: note = RNA
  modified_base 16..20: mod_base = OTHER; note = 2'-O-(2-methoxyethyl) ribonucleotide
  modified_base 11: mod_base = OTHER; note = 5-methyl cytidine
  modified_base 15: mod_base = OTHER; note = 5-methyl cytidine
tggatagaaacttacaggat

SEQ ID NO: 551 - DNA, 20 bp, synthetic construct
  source 1..20: mol_type = other DNA
  modified_base 1..20: mod_base = OTHER; note = Phosphorothioate linkage
  modified_base 1..5: mod_base = OTHER; note = 2'-O-(2-methoxyethyl) ribonucleotide
  misc_feature 1..5: note = RNA
  misc_feature 6..15: note = DNA
  misc_feature 16..20: note = RNA
  modified_base 16..20: mod_base = OTHER; note = 2'-O-(2-methoxyethyl) ribonucleotide
  modified_base 6: mod_base = OTHER; note = 5-methyl cytidine
  modified_base 9: mod_base = OTHER; note = 5-methyl cytidine
  modified_base 11: mod_base = OTHER; note = 5-methyl cytidine
  modified_base 14: mod_base = OTHER; note = 5-methyl cytidine
  modified_base 19: mod_base = OTHER; note = 5-methyl cytidine
gtaaacaacgctacaatact

SEQ ID NO: 552 - DNA, 20 bp, synthetic construct
  source 1..20: mol_type = other DNA
  modified_base 1..20: mod_base = OTHER; note = Phosphorothioate linkage
  modified_base 1..5: mod_base = OTHER; note = 2'-O-(2-methoxyethyl) ribonucleotide
  misc_feature 1..5: note = RNA
  misc_feature 6..15: note = DNA
  misc_feature 16..20: note = RNA
  modified_base 16..20: mod_base = OTHER; note = 2'-O-(2-methoxyethyl) ribonucleotide
  modified_base 5: mod_base = OTHER; note = 5-methyl cytidine
  modified_base 12: mod_base = OTHER; note = 5-methyl cytidine
  modified_base 14: mod_base = OTHER; note = 5-methyl cytidine
  modified_base 19..20: mod_base = OTHER; note = 5-methyl cytidine
taaacattggtctcttgtcc

SEQ ID NO: 553 - DNA, 20 bp, synthetic construct
  source 1..20: mol_type = other DNA
  modified_base 1..20: mod_base = OTHER; note = Phosphorothioate linkage
  modified_base 1..5: mod_base = OTHER; note = 2'-O-(2-methoxyethyl) ribonucleotide
  misc_feature 1..5: note = RNA
  misc_feature 6..15: note = DNA
  misc_feature 16..20: note = RNA
  modified_base 16..20: mod_base = OTHER; note = 2'-O-(2-methoxyethyl) ribonucleotide
  modified_base 19: mod_base = OTHER; note = 5-methyl cytidine
ttgtggagtggagtgtttct

SEQ ID NO: 554 - RNA, 20 nt, synthetic construct
  source 1..20: mol_type = other RNA
  modified_base 1..20: mod_base = OTHER; note = Phosphorothioate linkage
  modified_base 1..5: mod_base = OTHER; note = 2'-O-(2-methoxyethyl) ribonucleotide
  misc_feature 1..5: note = RNA
  misc_feature 6..15: note = DNA
  misc_feature 16..20: note = RNA
  modified_base 16..20: mod_base = OTHER; note = 2'-O-(2-methoxyethyl) ribonucleotide
  modified_base 1..3: mod_base = OTHER; note = 5-methyl cytidine
  modified_base 5: mod_base = OTHER; note = 5-methyl cytidine
  modified_base 8..10: mod_base = OTHER; note = 5-methyl cytidine
  modified_base 16: mod_base = OTHER; note = 5-methyl cytidine
  modified_base 18: mod_base = OTHER; note = 5-methyl cytidine
ccctcttccctttaactctt

SEQ ID NO: 555 - DNA, 20 bp, synthetic construct
  source 1..20: mol_type = other DNA
  modified_base 1..20: mod_base = OTHER; note = Phosphorothioate linkage
  modified_base 1..5: mod_base = OTHER; note = 2'-O-(2-methoxyethyl) ribonucleotide
  misc_feature 1..5: note = RNA
  misc_feature 6..15: note = DNA
  misc_feature 16..20: note = RNA
  modified_base 16..20: mod_base = OTHER; note = 2'-O-(2-methoxyethyl) ribonucleotide
  modified_base 4: mod_base = OTHER; note = 5-methyl cytidine
  modified_base 10: mod_base = OTHER; note = 5-methyl cytidine
  modified_base 12: mod_base = OTHER; note = 5-methyl cytidine
attcatattcacaggtaagt

SEQ ID NO: 556 - DNA, 20 bp, synthetic construct
  source 1..20: mol_type = other DNA
  modified_base 1..20: mod_base = OTHER; note = Phosphorothioate linkage
  modified_base 1..5: mod_base = OTHER; note = 2'-O-(2-methoxyethyl) ribonucleotide
  misc_feature 1..5: note = RNA
  misc_feature 6..15: note = DNA
  misc_feature 16..20: note = RNA
  modified_base 16..20: mod_base = OTHER; note = 2'-O-(2-methoxyethyl) ribonucleotide
  modified_base 14..15: mod_base = OTHER; note = 5-methyl cytidine
agaatgatgaaaaccgaggt

SEQ ID NO: 557 - RNA, 20 nt, synthetic construct
  source 1..20: mol_type = other RNA
  modified_base 1..20: mod_base = OTHER; note = Phosphorothioate linkage
  modified_base 1..5: mod_base = OTHER; note = 2'-O-(2-methoxyethyl) ribonucleotide
  misc_feature 1..5: note = RNA
  misc_feature 6..15: note = DNA
  misc_feature 16..20: note = RNA
  modified_base 16..20: mod_base = OTHER; note = 2'-O-(2-methoxyethyl) ribonucleotide
  modified_base 10: mod_base = OTHER; note = 5-methyl cytidine
  modified_base 15: mod_base = OTHER; note = 5-methyl cytidine
  modified_base 20: mod_base = OTHER; note = 5-methyl cytidine
gtttgaattctgttcagtgc

SEQ ID NO: 558 - DNA, 20 bp, synthetic construct
  source 1..20: mol_type = other DNA
  modified_base 1..20: mod_base = OTHER; note = Phosphorothioate linkage
  modified_base 1..5: mod_base = OTHER; note = 2'-O-(2-methoxyethyl) ribonucleotide
  misc_feature 1..5: note = RNA
  misc_feature 6..15: note = DNA
  misc_feature 16..20: note = RNA
  modified_base 16..20: mod_base = OTHER; note = 2'-O-(2-methoxyethyl) ribonucleotide
  modified_base 4..5: mod_base = OTHER; note = 5-methyl cytidine
  modified_base 11: mod_base = OTHER; note = 5-methyl cytidine
gatccttaggcaaatagata

SEQ ID NO: 559 - DNA, 20 bp, synthetic construct
  source 1..20: mol_type = other DNA
  modified_base 1..20: mod_base = OTHER; note = Phosphorothioate linkage
  modified_base 1..5: mod_base = OTHER; note = 2'-O-(2-methoxyethyl) ribonucleotide
  misc_feature 1..5: note = RNA
  misc_feature 6..15: note = DNA
  misc_feature 16..20: note = RNA
  modified_base 16..20: mod_base = OTHER; note = 2'-O-(2-methoxyethyl) ribonucleotide
  modified_base 3: mod_base = OTHER; note = 5-methyl cytidine
  modified_base 5: mod_base = OTHER; note = 5-methyl cytidine
  modified_base 10: mod_base = OTHER; note = 5-methyl cytidine
  modified_base 15: mod_base = OTHER; note = 5-methyl cytidine
gtcactgaactgtgcttggg

SEQ ID NO: 560 - DNA, 20 bp, synthetic construct
  source 1..20: mol_type = other DNA
  modified_base 1..20: mod_base = OTHER; note = Phosphorothioate linkage
  modified_base 1..5: mod_base = OTHER; note = 2'-O-(2-methoxyethyl) ribonucleotide
  misc_feature 1..5: note = RNA
  misc_feature 6..15: note = DNA
  misc_feature 16..20: note = RNA
  modified_base 16..20: mod_base = OTHER; note = 2'-O-(2-methoxyethyl) ribonucleotide
  modified_base 2: mod_base = OTHER; note = 5-methyl cytidine
  modified_base 4: mod_base = OTHER; note = 5-methyl cytidine
  modified_base 16: mod_base = OTHER; note = 5-methyl cytidine
  modified_base 18: mod_base = OTHER; note = 5-methyl cytidine
gctctgagtatgtttctcgt

SEQ ID NO: 561 - DNA, 20 bp, synthetic construct
  source 1..20: mol_type = other DNA
  modified_base 1..20: mod_base = OTHER; note = Phosphorothioate linkage
  modified_base 1..5: mod_base = OTHER; note = 2'-O-(2-methoxyethyl) ribonucleotide
  misc_feature 1..5: note = RNA
  misc_feature 6..15: note = DNA
  misc_feature 16..20: note = RNA
  modified_base 16..20: mod_base = OTHER; note = 2'-O-(2-methoxyethyl) ribonucleotide
  modified_base 2: mod_base = OTHER; note = 5-methyl cytidine
  modified_base 5: mod_base = OTHER; note = 5-methyl cytidine
  modified_base 11..12: mod_base = OTHER; note = 5-methyl cytidine
  modified_base 17..18: mod_base = OTHER; note = 5-methyl cytidine
tcagcaatttccaaggcctg

SEQ ID NO: 562 - DNA, 20 bp, synthetic construct
  source 1..20: mol_type = other DNA
  modified_base 1..20: mod_base = OTHER; note = Phosphorothioate linkage
  modified_base 1..5: mod_base = OTHER; note = 2'-O-(2-methoxyethyl) ribonucleotide
  misc_feature 1..5: note = RNA
  misc_feature 6..15: note = DNA
  misc_feature 16..20: note = RNA
  modified_base 16..20: mod_base = OTHER; note = 2'-O-(2-methoxyethyl) ribonucleotide
  modified_base 2: mod_base = OTHER; note = 5-methyl cytidine
  modified_base 4: mod_base = OTHER; note = 5-methyl cytidine
  modified_base 11..12: mod_base = OTHER; note = 5-methyl cytidine
  modified_base 14: mod_base = OTHER; note = 5-methyl cytidine
  modified_base 16: mod_base = OTHER; note = 5-methyl cytidine
  modified_base 20: mod_base = OTHER; note = 5-methyl cytidine
gctcaatttgcctctcgttc

SEQ ID NO: 563 - DNA, 20 bp, synthetic construct
  source 1..20: mol_type = other DNA
  modified_base 1..20: mod_base = OTHER; note = Phosphorothioate linkage
  modified_base 1..5: mod_base = OTHER; note = 2'-O-(2-methoxyethyl) ribonucleotide
  misc_feature 1..5: note = RNA
  misc_feature 6..15: note = DNA
  misc_feature 16..20: note = RNA
  modified_base 16..20: mod_base = OTHER; note = 2'-O-(2-methoxyethyl) ribonucleotide
gtaaaaaataagggttggga

SEQ ID NO: 564 - DNA, 20 bp, synthetic construct
  source 1..20: mol_type = other DNA
  modified_base 1..20: mod_base = OTHER; note = Phosphorothioate linkage
  modified_base 1..5: mod_base = OTHER; note = 2'-O-(2-methoxyethyl) ribonucleotide
  misc_feature 1..5: note = RNA
  misc_feature 6..15: note = DNA
  misc_feature 16..20: note = RNA
  modified_base 16..20: mod_base = OTHER; note = 2'-O-(2-methoxyethyl) ribonucleotide
  modified_base 1: mod_base = OTHER; note = 5-methyl cytidine
  modified_base 17: mod_base = OTHER; note = 5-methyl cytidine
  modified_base 19..20: mod_base = OTHER; note = 5-methyl cytidine
cttttagggtatttgtctcc

SEQ ID NO: 565 - DNA, 20 bp, synthetic construct
  source 1..20: mol_type = other DNA
  modified_base 1..20: mod_base = OTHER; note = Phosphorothioate linkage
  modified_base 1..5: mod_base = OTHER; note = 2'-O-(2-methoxyethyl) ribonucleotide
  misc_feature 1..5: note = RNA
  misc_feature 6..15: note = DNA
  misc_feature 16..20: note = RNA
  modified_base 16..20: mod_base = OTHER; note = 2'-O-(2-methoxyethyl) ribonucleotide
  modified_base 2: mod_base = OTHER; note = 5-methyl cytidine
  modified_base 7: mod_base = OTHER; note = 5-methyl cytidine
  modified_base 13: mod_base = OTHER; note = 5-methyl cytidine
gcaaggctgtttcaaatgtt

SEQ ID NO: 566 - DNA, 20 bp, synthetic construct
  source 1..20: mol_type = other DNA
  modified_base 1..20: mod_base = OTHER; note = Phosphorothioate linkage
  modified_base 1..5: mod_base = OTHER; note = 2'-O-(2-methoxyethyl) ribonucleotide
  misc_feature 1..5: note = RNA
  misc_feature 6..15: note = DNA
  misc_feature 16..20: note = RNA
  modified_base 16..20: mod_base = OTHER; note = 2'-O-(2-methoxyethyl) ribonucleotide
  modified_base 7..8: mod_base = OTHER; note = 5-methyl cytidine
  modified_base 12..13: mod_base = OTHER; note = 5-methyl cytidine
  modified_base 20: mod_base = OTHER; note = 5-methyl cytidine
gtgtgtccatgccagggtgc

SEQ ID NO: 567 - DNA, 20 bp, synthetic construct
  source 1..20: mol_type = other DNA
  modified_base 1..20: mod_base = OTHER; note = Phosphorothioate linkage
  modified_base 1..5: mod_base = OTHER; note = 2'-O-(2-methoxyethyl) ribonucleotide
  misc_feature 1..5: note = RNA
  misc_feature 6..15: note = DNA
  misc_feature 16..20: note = RNA
  modified_base 16..20: mod_base = OTHER; note = 2'-O-(2-methoxyethyl) ribonucleotide
  modified_base 2: mod_base = OTHER; note = 5-methyl cytidine
  modified_base 8: mod_base = OTHER; note = 5-methyl cytidine
  modified_base 13: mod_base = OTHER; note = 5-methyl cytidine
  modified_base 16: mod_base = OTHER; note = 5-methyl cytidine
  modified_base 19: mod_base = OTHER; note = 5-methyl cytidine
gcttatacagagcttcatct

SEQ ID NO: 568 - DNA, 20 bp, synthetic construct
  source 1..20: mol_type = other DNA
  modified_base 1..20: mod_base = OTHER; note = Phosphorothioate linkage
  modified_base 1..5: mod_base = OTHER; note = 2'-O-(2-methoxyethyl) ribonucleotide
  misc_feature 1..5: note = RNA
  misc_feature 6..15: note = DNA
  misc_feature 16..20: note = RNA
  modified_base 16..20: mod_base = OTHER; note = 2'-O-(2-methoxyethyl) ribonucleotide
  modified_base 1: mod_base = OTHER; note = 5-methyl cytidine
  modified_base 3: mod_base = OTHER; note = 5-methyl cytidine
  modified_base 8..9: mod_base = OTHER; note = 5-methyl cytidine
  modified_base 14: mod_base = OTHER; note = 5-methyl cytidine
ctcaagacctgttcatttga

SEQ ID NO: 569 - DNA, 20 bp, synthetic construct
  source 1..20: mol_type = other DNA
  modified_base 1..20: mod_base = OTHER; note = Phosphorothioate linkage
  modified_base 1..5: mod_base = OTHER; note = 2'-O-(2-methoxyethyl) ribonucleotide
  misc_feature 1..5: note = RNA
  misc_feature 6..15: note = DNA
  misc_feature 16..20: note = RNA
  modified_base 16..20: mod_base = OTHER; note = 2'-O-(2-methoxyethyl) ribonucleotide
  modified_base 11: mod_base = OTHER; note = 5-methyl cytidine
  modified_base 14: mod_base = OTHER; note = 5-methyl cytidine
  modified_base 16: mod_base = OTHER; note = 5-methyl cytidine
gaggaagaggcagcacaaat

SEQ ID NO: 570 - DNA, 20 bp, synthetic construct
  source 1..20: mol_type = other DNA
  modified_base 1..20: mod_base = OTHER; note = Phosphorothioate linkage
  modified_base 1..5: mod_base = OTHER; note = 2'-O-(2-methoxyethyl) ribonucleotide
  misc_feature 1..5: note = RNA
  misc_feature 6..15: note = DNA
  misc_feature 16..20: note = RNA
  modified_base 16..20: mod_base = OTHER; note = 2'-O-(2-methoxyethyl) ribonucleotide
  modified_base 13: mod_base = OTHER; note = 5-methyl cytidine
  modified_base 15: mod_base = OTHER; note = 5-methyl cytidine
  modified_base 19: mod_base = OTHER; note = 5-methyl cytidine
gggaaaagtaagctcaggca

SEQ ID NO: 571 - DNA, 20 bp, synthetic construct
  source 1..20: mol_type = other DNA
  modified_base 1..20: mod_base = OTHER; note = Phosphorothioate linkage
  modified_base 1..5: mod_base = OTHER; note = 2'-O-(2-methoxyethyl) ribonucleotide
  misc_feature 1..5: note = RNA
  misc_feature 6..15: note = DNA
  misc_feature 16..20: note = RNA
  modified_base 16..20: mod_base = OTHER; note = 2'-O-(2-methoxyethyl) ribonucleotide
  modified_base 20: mod_base = OTHER; note = 5-methyl cytidine
tgaaggctggagtgagaggc

SEQ ID NO: 572 - DNA, 20 bp, synthetic construct
  source 1..20: mol_type = other DNA
  modified_base 1..20: mod_base = OTHER; note = Phosphorothioate linkage
  modified_base 1..5: mod_base = OTHER; note = 2'-O-(2-methoxyethyl) ribonucleotide
  misc_feature 1..5: note = RNA
  misc_feature 6..15: note = DNA
  misc_feature 16..20: note = RNA
  modified_base 16..20: mod_base = OTHER; note = 2'-O-(2-methoxyethyl) ribonucleotide
  modified_base 10..12: mod_base = OTHER; note = 5-methyl cytidine
gttgagaggcccaaatgagg

SEQ ID NO: 573 - DNA, 20 bp, synthetic construct
  source 1..20: mol_type = other DNA
  modified_base 1..20: mod_base = OTHER; note = Phosphorothioate linkage
  modified_base 1..5: mod_base = OTHER; note = 2'-O-(2-methoxyethyl) ribonucleotide
  misc_feature 1..5: note = RNA
  misc_feature 6..15: note = DNA
  misc_feature 16..20: note = RNA
  modified_base 16..20: mod_base = OTHER; note = 2'-O-(2-methoxyethyl) ribonucleotide
  modified_base 6: mod_base = OTHER; note = 5-methyl cytidine
  modified_base 8..10: mod_base = OTHER; note = 5-methyl cytidine
  modified_base 13: mod_base = OTHER; note = 5-methyl cytidine
  modified_base 15..16: mod_base = OTHER; note = 5-methyl cytidine
gatagcacccaactcctagg

SEQ ID NO: 574 - DNA, 20 bp, synthetic construct
  source 1..20: mol_type = other DNA
  modified_base 1..20: mod_base = OTHER; note = Phosphorothioate linkage
  modified_base 1..5: mod_base = OTHER; note = 2'-O-(2-methoxyethyl) ribonucleotide
  misc_feature 1..5: note = RNA
  misc_feature 6..15: note = DNA
  misc_feature 16..20: note = RNA
  modified_base 16..20: mod_base = OTHER; note = 2'-O-(2-methoxyethyl) ribonucleotide
  modified_base 3: mod_base = OTHER; note = 5-methyl cytidine
  modified_base 6: mod_base = OTHER; note = 5-methyl cytidine
  modified_base 8: mod_base = OTHER; note = 5-methyl cytidine
  modified_base 11: mod_base = OTHER; note = 5-methyl cytidine
  modified_base 14: mod_base = OTHER; note = 5-methyl cytidine
ggcttcacatctactagttg

SEQ ID NO: 575 - DNA, 20 bp, synthetic construct
  source 1..20: mol_type = other DNA
  modified_base 1..20: mod_base = OTHER; note = Phosphorothioate linkage
  modified_base 1..5: mod_base = OTHER; note = 2'-O-(2-methoxyethyl) ribonucleotide
  misc_feature 1..5: note = RNA
  misc_feature 6..15: note = DNA
  misc_feature 16..20: note = RNA
  modified_base 16..20: mod_base = OTHER; note = 2'-O-(2-methoxyethyl) ribonucleotide
  modified_base 2: mod_base = OTHER; note = 5-methyl cytidine
  modified_base 4: mod_base = OTHER; note = 5-methyl cytidine
gcacagagtggaagaaggtt

SEQ ID NO: 576 - DNA, 20 bp, synthetic construct
  source 1..20: mol_type = other DNA
  modified_base 1..20: mod_base = OTHER; note = Phosphorothioate linkage
  modified_base 1..5: mod_base = OTHER; note = 2'-O-(2-methoxyethyl) ribonucleotide
  misc_feature 1..5: note = RNA
  misc_feature 6..15: note = DNA
  misc_feature 16..20: note = RNA
  modified_base 16..20: mod_base = OTHER; note = 2'-O-(2-methoxyethyl) ribonucleotide
  modified_base 10: mod_base = OTHER; note = 5-methyl cytidine
  modified_base 12: mod_base = OTHER; note = 5-methyl cytidine
  modified_base 16..18: mod_base = OTHER; note = 5-methyl cytidine
attaagaagcactggcccat

SEQ ID NO: 577 - RNA, 20 nt, synthetic construct
  source 1..20: mol_type = other RNA
  modified_base 1..20: mod_base = OTHER; note = Phosphorothioate linkage
  modified_base 1..20: mod_base = OTHER; note = 2'-O-(2-methoxyethyl) ribonucleotide
  modified_base 3: mod_base = OTHER; note = 5-methyl cytidine
  modified_base 5: mod_base = OTHER; note = 5-methyl cytidine
  modified_base 7: mod_base = OTHER; note = 5-methyl cytidine
  modified_base 10: mod_base = OTHER; note = 5-methyl cytidine
  modified_base 13: mod_base = OTHER; note = 5-methyl cytidine
  modified_base 16..17: mod_base = OTHER; note = 5-methyl cytidine
  modified_base 20: mod_base = OTHER; note = 5-methyl cytidine
gacacacagcatcaaccgac

SEQ ID NO: 578 - RNA, 20 nt, synthetic construct
  source 1..20: mol_type = other RNA
  modified_base 1..20: mod_base = OTHER; note = Phosphorothioate linkage
  modified_base 1..20: mod_base = OTHER; note = 2'-O-(2-methoxyethyl) ribonucleotide
  modified_base 4: mod_base = OTHER; note = 5-methyl cytidine
  modified_base 7..8: mod_base = OTHER; note = 5-methyl cytidine
  modified_base 13..15: mod_base = OTHER; note = 5-methyl cytidine
  modified_base 17: mod_base = OTHER; note = 5-methyl cytidine
tatcagccatagccctcagg

SEQ ID NO: 579 - RNA, 20 nt, synthetic construct
  source 1..20: mol_type = other RNA
  modified_base 1..20: mod_base = OTHER; note = Phosphorothioate linkage
  modified_base 1..20: mod_base = OTHER; note = 2'-O-(2-methoxyethyl) ribonucleotide
  modified_base 1..2: mod_base = OTHER; note = 5-methyl cytidine
  modified_base 4: mod_base = OTHER; note = 5-methyl cytidine
  modified_base 7: mod_base = OTHER; note = 5-methyl cytidine
  modified_base 12..13: mod_base = OTHER; note = 5-methyl cytidine
  modified_base 15: mod_base = OTHER; note = 5-methyl cytidine
cctcaacggtgcctctgaag

SEQ ID NO: 580 - RNA, 20 nt, synthetic construct
  source 1..20: mol_type = other RNA
  modified_base 1..20: mod_base = OTHER; note = Phosphorothioate linkage
  modified_base 1..20: mod_base = OTHER; note = 2'-O-(2-methoxyethyl) ribonucleotide
  modified_base 1: mod_base = OTHER; note = 5-methyl cytidine
  modified_base 12: mod_base = OTHER; note = 5-methyl cytidine
  modified_base 16: mod_base = OTHER; note = 5-methyl cytidine
ctttggtgttacattctgtt

SEQ ID NO: 581 - RNA, 20 nt, synthetic construct
  source 1..20: mol_type = other RNA
  modified_base 1..20: mod_base = OTHER; note = Phosphorothioate linkage
  modified_base 1..20: mod_base = OTHER; note = 2'-O-(2-methoxyethyl) ribonucleotide
  modified_base 3..4: mod_base = OTHER; note = 5-methyl cytidine
  modified_base 13..15: mod_base = OTHER; note = 5-methyl cytidine
tgccataaaatgcccaagtt

SEQ ID NO: 582 - RNA, 20 nt, synthetic construct
  source 1..20: mol_type = other RNA
  modified_base 1..20: mod_base = OTHER; note = Phosphorothioate linkage
  modified_base 1..20: mod_base = OTHER; note = 2'-O-(2-methoxyethyl) ribonucleotide
  modified_base 6: mod_base = OTHER; note = 5-methyl cytidine
  modified_base 10..13: mod_base = OTHER; note = 5-methyl cytidine
gattgcaagccccttgaata

SEQ ID NO: 583 - RNA, 20 nt, synthetic construct
  source 1..20: mol_type = other RNA
  modified_base 1..20: mod_base = OTHER; note = Phosphorothioate linkage
  modified_base 1..20: mod_base = OTHER; note = 2'-O-(2-methoxyethyl) ribonucleotide
  modified_base 6: mod_base = OTHER; note = 5-methyl cytidine
  modified_base 8: mod_base = OTHER; note = 5-methyl cytidine
  modified_base 10..11: mod_base = OTHER; note = 5-methyl cytidine
  modified_base 13..16: mod_base = OTHER; note = 5-methyl cytidine
  modified_base 18: mod_base = OTHER; note = 5-methyl cytidine
  modified_base 20: mod_base = OTHER; note = 5-methyl cytidine
gtttacactccaccccactc

SEQ ID NO: 584 - RNA, 20 nt, synthetic construct
  source 1..20: mol_type = other RNA
  modified_base 1..20: mod_base = OTHER; note = Phosphorothioate linkage
  modified_base 1..20: mod_base = OTHER; note = 2'-O-(2-methoxyethyl) ribonucleotide
  modified_base 1..2: mod_base = OTHER; note = 5-methyl cytidine
  modified_base 4..5: mod_base = OTHER; note = 5-methyl cytidine
  modified_base 10..12: mod_base = OTHER; note = 5-methyl cytidine
  modified_base 16: mod_base = OTHER; note = 5-methyl cytidine
cctccatttccctgtctagg

SEQ ID NO: 585 - RNA, 20 nt, synthetic construct
  source 1..20: mol_type = other RNA
  modified_base 1..20: mod_base = OTHER; note = Phosphorothioate linkage
  modified_base 1..20: mod_base = OTHER; note = 2'-O-(2-methoxyethyl) ribonucleotide
  modified_base 1: mod_base = OTHER; note = 5-methyl cytidine
  modified_base 3: mod_base = OTHER; note = 5-methyl cytidine
  modified_base 13: mod_base = OTHER; note = 5-methyl cytidine
  modified_base 15: mod_base = OTHER; note = 5-methyl cytidine
cactgtgattgtctctggtt

SEQ ID NO: 586 - RNA, 20 nt, synthetic construct
  source 1..20: mol_type = other RNA
  modified_base 1..20: mod_base = OTHER; note = Phosphorothioate linkage
  modified_base 1..20: mod_base = OTHER; note = 2'-O-(2-methoxyethyl) ribonucleotide
  modified_base 2: mod_base = OTHER; note = 5-methyl cytidine
gctttttagagatgttagag

SEQ ID NO: 587 - RNA, 20 nt, synthetic construct
  source 1..20: mol_type = other RNA
  modified_base 1..20: mod_base = OTHER; note = Phosphorothioate linkage
  modified_base 1..20: mod_base = OTHER; note = 2'-O-(2-methoxyethyl) ribonucleotide
  modified_base 7: mod_base = OTHER; note = 5-methyl cytidine
  modified_base 9: mod_base = OTHER; note = 5-methyl cytidine
  modified_base 16: mod_base = OTHER; note = 5-methyl cytidine
gggagtcacatattgctaat

SEQ ID NO: 588 - RNA, 20 nt, synthetic construct
  source 1..20: mol_type = other RNA
  modified_base 1..20: mod_base = OTHER; note = Phosphorothioate linkage
  modified_base 1..20: mod_base = OTHER; note = 2'-O-(2-methoxyethyl) ribonucleotide
  modified_base 17: mod_base = OTHER; note = 5-methyl cytidine
gggagaaagtttgtttctag

SEQ ID NO: 589 - RNA, 20 nt, synthetic construct
  source 1..20: mol_type = other RNA
  modified_base 1..20: mod_base = OTHER; note = Phosphorothioate linkage
  modified_base 1..20: mod_base = OTHER; note = 2'-O-(2-methoxyethyl) ribonucleotide
  modified_base 1: mod_base = OTHER; note = 5-methyl cytidine
  modified_base 6: mod_base = OTHER; note = 5-methyl cytidine
  modified_base 9: mod_base = OTHER; note = 5-methyl cytidine
  modified_base 15..17: mod_base = OTHER; note = 5-methyl cytidine
catttcttcattgtcccggt

SEQ ID NO: 590 - RNA, 20 nt, synthetic construct
  source 1..20: mol_type = other RNA
  modified_base 1..20: mod_base = OTHER; note = Phosphorothioate linkage
  modified_base 1..20: mod_base = OTHER; note = 2'-O-(2-methoxyethyl) ribonucleotide
  modified_base 4: mod_base = OTHER; note = 5-methyl cytidine
  modified_base 9: mod_base = OTHER; note = 5-methyl cytidine
  modified_base 11..12: mod_base = OTHER; note = 5-methyl cytidine
  modified_base 15: mod_base = OTHER; note = 5-methyl cytidine
  modified_base 17..18: mod_base = OTHER; note = 5-methyl cytidine
tatcttttctccaacaccgt

SEQ ID NO: 591 - RNA, 20 nt, synthetic construct
  source 1..20: mol_type = other RNA
  modified_base 1..20: mod_base = OTHER; note = Phosphorothioate linkage
  modified_base 1..20: mod_base = OTHER; note = 2'-O-(2-methoxyethyl) ribonucleotide
  modified_base 6: mod_base = OTHER; note = 5-methyl cytidine
  modified_base 11: mod_base = OTHER; note = 5-methyl cytidine
  modified_base 14: mod_base = OTHER; note = 5-methyl cytidine
  modified_base 16..17: mod_base = OTHER; note = 5-methyl cytidine
  modified_base 20: mod_base = OTHER; note = 5-methyl cytidine
taatgcagaactacaccgac

SEQ ID NO: 592 - RNA, 20 nt, synthetic construct
  source 1..20: mol_type = other RNA
  modified_base 1..20: mod_base = OTHER; note = Phosphorothioate linkage
  modified_base 1..20: mod_base = OTHER; note = 2'-O-(2-methoxyethyl) ribonucleotide
  modified_base 3: mod_base = OTHER; note = 5-methyl cytidine
  modified_base 6..8: mod_base = OTHER; note = 5-methyl cytidine
  modified_base 16: mod_base = OTHER; note = 5-methyl cytidine
ttctacccttgaaagctggt

SEQ ID NO: 593 - RNA, 20 nt, synthetic construct
  source 1..20: mol_type = other RNA
  modified_base 1..20: mod_base = OTHER; note = Phosphorothioate linkage
  modified_base 1..20: mod_base = OTHER; note = 2'-O-(2-methoxyethyl) ribonucleotide
  modified_base 2: mod_base = OTHER; note = 5-methyl cytidine
  modified_base 4: mod_base = OTHER; note = 5-methyl cytidine
  modified_base 9: mod_base = OTHER; note = 5-methyl cytidine
  modified_base 16: mod_base = OTHER; note = 5-methyl cytidine
  modified_base 18: mod_base = OTHER; note = 5-methyl cytidine
gcacaattctgtttgctctg

SEQ ID NO: 594 - RNA, 20 nt, synthetic construct
  source 1..20: mol_type = other RNA
  modified_base 1..20: mod_base = OTHER; note = Phosphorothioate linkage
  modified_base 1..20: mod_base = OTHER; note = 2'-O-(2-methoxyethyl) ribonucleotide
  modified_base 9: mod_base = OTHER; note = 5-methyl cytidine
  modified_base 16..17: mod_base = OTHER; note = 5-methyl cytidine
gtgtggtacaaatggccgaa

SEQ ID NO: 595 - RNA, 20 nt, synthetic construct
  source 1..20: mol_type = other RNA
  modified_base 1..20: mod_base = OTHER; note = Phosphorothioate linkage
  modified_base 1..20: mod_base = OTHER; note = 2'-O-(2-methoxyethyl) ribonucleotide
  modified_base 19: mod_base = OTHER; note = 5-methyl cytidine
gagagagagagtggtgtaca

SEQ ID NO: 596 - RNA, 20 nt, synthetic construct
  source 1..20: mol_type = other RNA
  modified_base 1..20: mod_base = OTHER; note = Phosphorothioate linkage
  modified_base 1..20: mod_base = OTHER; note = 2'-O-(2-methoxyethyl) ribonucleotide
  modified_base 1: mod_base = OTHER; note = 5-methyl cytidine
  modified_base 6: mod_base = OTHER; note = 5-methyl cytidine
  modified_base 13: mod_base = OTHER; note = 5-methyl cytidine
  modified_base 15: mod_base = OTHER; note = 5-methyl cytidine
caatacagatgactcttggt

SEQ ID NO: 597 - RNA, 20 nt, synthetic construct
  source 1..20: mol_type = other RNA
  modified_base 1..20: mod_base = OTHER; note = Phosphorothioate linkage
  modified_base 1..20: mod_base = OTHER; note = 2'-O-(2-methoxyethyl) ribonucleotide
  modified_base 11: mod_base = OTHER; note = 5-methyl cytidine
  modified_base 15: mod_base = OTHER; note = 5-methyl cytidine
tggatagaaacttacaggat

SEQ ID NO: 598 - RNA, 20 nt, synthetic construct
  source 1..20: mol_type = other RNA
  modified_base 1..20: mod_base = OTHER; note = Phosphorothioate linkage
  modified_base 1..20: mod_base = OTHER; note = 2'-O-(2-methoxyethyl) ribonucleotide
  modified_base 6: mod_base = OTHER; note = 5-methyl cytidine
  modified_base 9: mod_base = OTHER; note = 5-methyl cytidine
  modified_base 11: mod_base = OTHER; note = 5-methyl cytidine
  modified_base 14: mod_base = OTHER; note = 5-methyl cytidine
  modified_base 19: mod_base = OTHER; note = 5-methyl cytidine
gtaaacaacgctacaatact

SEQ ID NO: 599 - RNA, 20 nt, synthetic construct
  source 1..20: mol_type = other RNA
  modified_base 1..20: mod_base = OTHER; note = Phosphorothioate linkage
  modified_base 1..20: mod_base = OTHER; note = 2'-O-(2-methoxyethyl) ribonucleotide
  modified_base 5: mod_base = OTHER; note = 5-methyl cytidine
  modified_base 4..6: mod_base = OTHER; note = 5-methyl cytidine
  modified_base 12: mod_base = OTHER; note = 5-methyl cytidine
  modified_base 14: mod_base = OTHER; note = 5-methyl cytidine
  modified_base 19..20: mod_base = OTHER; note = 5-methyl cytidine
taaacattggtctcttgtcc

SEQ ID NO: 600 - RNA, 20 nt, synthetic construct
  source 1..20: mol_type = other RNA
  modified_base 1..20: mod_base = OTHER; note = Phosphorothioate linkage
  modified_base 1..20: mod_base = OTHER; note = 2'-O-(2-methoxyethyl) ribonucleotide
  modified_base 19: mod_base = OTHER; note = 5-methyl cytidine
ttgtggagtggagtgtttct

SEQ ID NO: 601 - RNA, 20 nt, synthetic construct
  source 1..20: mol_type = other RNA
  modified_base 1..20: mod_base = OTHER; note = Phosphorothioate linkage
  modified_base 1..20: mod_base = OTHER; note = 2'-O-(2-methoxyethyl) ribonucleotide
  modified_base 1..3: mod_base = OTHER; note = 5-methyl cytidine
  modified_base 5: mod_base = OTHER; note = 5-methyl cytidine
  modified_base 8..10: mod_base = OTHER; note = 5-methyl cytidine
  modified_base 16: mod_base = OTHER; note = 5-methyl cytidine
  modified_base 18: mod_base = OTHER; note = 5-methyl cytidine
ccctcttccctttaactctt

SEQ ID NO: 602 - RNA, 20 nt, synthetic construct
  source 1..20: mol_type = other RNA
  modified_base 1..20: mod_base = OTHER; note = Phosphorothioate linkage
  modified_base 1..20: mod_base = OTHER; note = 2'-O-(2-methoxyethyl) ribonucleotide
  modified_base 4: mod_base = OTHER; note = 5-methyl cytidine
  modified_base 10: mod_base = OTHER; note = 5-methyl cytidine
  modified_base 12: mod_base = OTHER; note = 5-methyl cytidine
attcatattcacaggtaagt

SEQ ID NO: 603 - RNA, 20 nt, synthetic construct
  source 1..20: mol_type = other RNA
  modified_base 1..20: mod_base = OTHER; note = Phosphorothioate linkage
  modified_base 1..20: mod_base = OTHER; note = 2'-O-(2-methoxyethyl) ribonucleotide
  modified_base 14..15: mod_base = OTHER; note = 5-methyl cytidine
agaatgatgaaaaccgaggt

SEQ ID NO: 604 - RNA, 20 nt, synthetic construct
  source 1..20: mol_type = other RNA
  modified_base 1..20: mod_base = OTHER; note = Phosphorothioate linkage
  modified_base 1..20: mod_base = OTHER; note = 2'-O-(2-methoxyethyl) ribonucleotide
  modified_base 10: mod_base = OTHER; note = 5-methyl cytidine
  modified_base 15: mod_base = OTHER; note = 5-methyl cytidine
  modified_base 20: mod_base = OTHER; note = 5-methyl cytidine
gtttgaattctgttcagtgc

SEQ ID NO: 605 - RNA, 20 nt, synthetic construct
  source 1..20: mol_type = other RNA
  modified_base 1..20: mod_base = OTHER; note = Phosphorothioate linkage
  modified_base 1..20: mod_base = OTHER; note = 2'-O-(2-methoxyethyl) ribonucleotide
  modified_base 4..5: mod_base = OTHER; note = 5-methyl cytidine
  modified_base 11: mod_base = OTHER; note = 5-methyl cytidine
gatccttaggcaaatagata

SEQ ID NO: 606 - RNA, 20 nt, synthetic construct
  source 1..20: mol_type = other RNA
  modified_base 1..20: mod_base = OTHER; note = Phosphorothioate linkage
  modified_base 1..20: mod_base = OTHER; note = 2'-O-(2-methoxyethyl) ribonucleotide
  modified_base 3: mod_base = OTHER; note = 5-methyl cytidine
  modified_base 5: mod_base = OTHER; note = 5-methyl cytidine
  modified_base 10: mod_base = OTHER; note = 5-methyl cytidine
  modified_base 15: mod_base = OTHER; note = 5-methyl cytidine
gtcactgaactgtgcttggg

SEQ ID NO: 607 - RNA, 20 nt, synthetic construct
  source 1..20: mol_type = other RNA
  modified_base 1..20: mod_base = OTHER; note = Phosphorothioate linkage
  modified_base 1..20: mod_base = OTHER; note = 2'-O-(2-methoxyethyl) ribonucleotide
  modified_base 2: mod_base = OTHER; note = 5-methyl cytidine
  modified_base 4: mod_base = OTHER; note = 5-methyl cytidine
  modified_base 16: mod_base = OTHER; note = 5-methyl cytidine
  modified_base 18: mod_base = OTHER; note = 5-methyl cytidine
gctctgagtatgtttctcgt

SEQ ID NO: 608 - RNA, 20 nt, synthetic construct
  source 1..20: mol_type = other RNA
  modified_base 1..20: mod_base = OTHER; note = Phosphorothioate linkage
  modified_base 1..20: mod_base = OTHER; note = 2'-O-(2-methoxyethyl) ribonucleotide
  modified_base 2: mod_base = OTHER; note = 5-methyl cytidine
  modified_base 5: mod_base = OTHER; note = 5-methyl cytidine
  modified_base 11..12: mod_base = OTHER; note = 5-methyl cytidine
  modified_base 17..18: mod_base = OTHER; note = 5-methyl cytidine
tcagcaatttccaaggcctg

SEQ ID NO: 609 - RNA, 20 nt, synthetic construct
  source 1..20: mol_type = other RNA
  modified_base 1..20: mod_base = OTHER; note = Phosphorothioate linkage
  modified_base 1..20: mod_base = OTHER; note = 2'-O-(2-methoxyethyl) ribonucleotide
  modified_base 2: mod_base = OTHER; note = 5-methyl cytidine
  modified_base 4: mod_base = OTHER; note = 5-methyl cytidine
  modified_base 11..12: mod_base = OTHER; note = 5-methyl cytidine
  modified_base 14: mod_base = OTHER; note = 5-methyl cytidine
  modified_base 16: mod_base = OTHER; note = 5-methyl cytidine
  modified_base 20: mod_base = OTHER; note = 5-methyl cytidine
gctcaatttgcctctcgttc

SEQ ID NO: 610 - RNA, 20 nt, synthetic construct
  source 1..20: mol_type = other RNA
  modified_base 1..20: mod_base = OTHER; note = Phosphorothioate linkage
  modified_base 1..20: mod_base = OTHER; note = 2'-O-(2-methoxyethyl) ribonucleotide
gtaaaaaataagggttggga

SEQ ID NO: 611 - RNA, 20 nt, synthetic construct
  source 1..20: mol_type = other RNA
  modified_base 1..20: mod_base = OTHER; note = Phosphorothioate linkage
  modified_base 1..20: mod_base = OTHER; note = 2'-O-(2-methoxyethyl) ribonucleotide
  modified_base 1: mod_base = OTHER; note = 5-methyl cytidine
  modified_base 17: mod_base = OTHER; note = 5-methyl cytidine
  modified_base 19..20: mod_base = OTHER; note = 5-methyl cytidine
cttttagggtatttgtctcc

SEQ ID NO: 612 - RNA, 20 nt, synthetic construct
  source 1..20: mol_type = other RNA
  modified_base 1..20: mod_base = OTHER; note = Phosphorothioate linkage
  modified_base 1..20: mod_base = OTHER; note = 2'-O-(2-methoxyethyl) ribonucleotide
  modified_base 2: mod_base = OTHER; note = 5-methyl cytidine
  modified_base 7: mod_base = OTHER; note = 5-methyl cytidine
  modified_base 13: mod_base = OTHER; note = 5-methyl cytidine
gcaaggctgtttcaaatgtt

SEQ ID NO: 613 - RNA, 20 nt, synthetic construct
  source 1..20: mol_type = other RNA
  modified_base 1..20: mod_base = OTHER; note = Phosphorothioate linkage
  modified_base 1..20: mod_base = OTHER; note = 2'-O-(2-methoxyethyl) ribonucleotide
  modified_base 7..8: mod_base = OTHER; note = 5-methyl cytidine
  modified_base 12..13: mod_base = OTHER; note = 5-methyl cytidine
  modified_base 20: mod_base = OTHER; note = 5-methyl cytidine
gtgtgtccatgccagggtgc

SEQ ID NO: 614 - RNA, 20 nt, synthetic construct
  source 1..20: mol_type = other RNA
  modified_base 1..20: mod_base = OTHER; note = Phosphorothioate linkage
  modified_base 1..20: mod_base = OTHER; note = 2'-O-(2-methoxyethyl) ribonucleotide
  modified_base 2: mod_base = OTHER; note = 5-methyl cytidine
  modified_base 8: mod_base = OTHER; note = 5-methyl cytidine
  modified_base 13: mod_base = OTHER; note = 5-methyl cytidine
  modified_base 16: mod_base = OTHER; note = 5-methyl cytidine
  modified_base 19: mod_base = OTHER; note = 5-methyl cytidine
gcttatacagagcttcatct

SEQ ID NO: 615 - RNA, 20 nt, synthetic construct
  source 1..20: mol_type = other RNA
  modified_base 1..20: mod_base = OTHER; note = Phosphorothioate linkage
  modified_base 1..20: mod_base = OTHER; note = 2'-O-(2-methoxyethyl) ribonucleotide
  modified_base 1: mod_base = OTHER; note = 5-methyl cytidine
  modified_base 3: mod_base = OTHER; note = 5-methyl cytidine
  modified_base 8..9: mod_base = OTHER; note = 5-methyl cytidine
  modified_base 14: mod_base = OTHER; note = 5-methyl cytidine
ctcaagacctgttcatttga

SEQ ID NO: 616 - RNA, 20 nt, synthetic construct
  source 1..20: mol_type = other RNA
  modified_base 1..20: mod_base = OTHER; note = Phosphorothioate linkage
  modified_base 1..20: mod_base = OTHER; note = 2'-O-(2-methoxyethyl) ribonucleotide
  modified_base 11: mod_base = OTHER; note = 5-methyl cytidine
  modified_base 14: mod_base = OTHER; note = 5-methyl cytidine
  modified_base 16: mod_base = OTHER; note = 5-methyl cytidine
gaggaagaggcagcacaaat

SEQ ID NO: 617 - RNA, 20 nt, synthetic construct
  source 1..20: mol_type = other RNA
  modified_base 1..20: mod_base = OTHER; note = Phosphorothioate linkage
  modified_base 1..20: mod_base = OTHER; note = 2'-O-(2-methoxyethyl) ribonucleotide
  modified_base 13: mod_base = OTHER; note = 5-methyl cytidine
  modified_base 15: mod_base = OTHER; note = 5-methyl cytidine
  modified_base 19: mod_base = OTHER; note = 5-methyl cytidine
gggaaaagtaagctcaggca

SEQ ID NO: 618 - RNA, 20 nt, synthetic construct
  source 1..20: mol_type = other RNA
  modified_base 1..20: mod_base = OTHER; note = Phosphorothioate linkage
  modified_base 1..20: mod_base = OTHER; note = 2'-O-(2-methoxyethyl) ribonucleotide
  modified_base 7: mod_base = OTHER; note = 5-methyl cytidine
  modified_base 20: mod_base = OTHER; note = 5-methyl cytidine
tgaaggctggagtgagaggc

SEQ ID NO: 619 - RNA, 20 nt, synthetic construct
  source 1..20: mol_type = other RNA
  modified_base 1..20: mod_base = OTHER; note = Phosphorothioate linkage
  modified_base 1..20: mod_base = OTHER; note = 2'-O-(2-methoxyethyl) ribonucleotide
  modified_base 10..12: mod_base = OTHER; note = 5-methyl cytidine
gttgagaggcccaaatgagg

SEQ ID NO: 620 - RNA, 20 nt, synthetic construct
  source 1..20: mol_type = other RNA
  modified_base 1..20: mod_base = OTHER; note = Phosphorothioate linkage
  modified_base 1..20: mod_base = OTHER; note = 2'-O-(2-methoxyethyl) ribonucleotide
  modified_base 6: mod_base = OTHER; note = 5-methyl cytidine
  modified_base 8..10: mod_base = OTHER; note = 5-methyl cytidine
  modified_base 13: mod_base = OTHER; note = 5-methyl cytidine
  modified_base 15..16: mod_base = OTHER; note = 5-methyl cytidine
gatagcacccaactcctagg

SEQ ID NO: 621 - RNA, 20 nt, synthetic construct
  source 1..20: mol_type = other RNA
  modified_base 1..20: mod_base = OTHER; note = Phosphorothioate linkage
  modified_base 1..20: mod_base = OTHER; note = 2'-O-(2-methoxyethyl) ribonucleotide
  modified_base 2: mod_base = OTHER; note = 5-methyl cytidine
  modified_base 6: mod_base = OTHER; note = 5-methyl cytidine
  modified_base 8: mod_base = OTHER; note = 5-methyl cytidine
  modified_base 11: mod_base = OTHER; note = 5-methyl cytidine
  modified_base 14: mod_base = OTHER; note = 5-methyl cytidine
ggcttcacatctactagttg

SEQ ID NO: 622 - RNA, 20 nt, synthetic construct
  source 1..20: mol_type = other RNA
  modified_base 1..20: mod_base = OTHER; note = Phosphorothioate linkage
  modified_base 1..20: mod_base = OTHER; note = 2'-O-(2-methoxyethyl) ribonucleotide
  modified_base 2: mod_base = OTHER; note = 5-methyl cytidine
  modified_base 4: mod_base = OTHER; note = 5-methyl cytidine
gcacagagtggaagaaggtt

SEQ ID NO: 623 - RNA, 20 nt, synthetic construct
  source 1..20: mol_type = other RNA
  modified_base 1..20: mod_base = OTHER; note = Phosphorothioate linkage
  modified_base 1..20: mod_base = OTHER; note = 2'-O-(2-methoxyethyl) ribonucleotide
  modified_base 10: mod_base = OTHER; note = 5-methyl cytidine
  modified_base 12: mod_base = OTHER; note = 5-methyl cytidine
  modified_base 16..18: mod_base = OTHER; note = 5-methyl cytidine
attaagaagcactggcccat

SEQ ID NO: 624 - DNA, 21 bp, synthetic construct
  source 1..21: mol_type = other DNA
  modified_base 1..21: mod_base = OTHER; note = Phosphorothioate linkage
  modified_base 1..5: mod_base = OTHER; note = 2'-O-(2-methoxyethyl) ribonucleotide
  misc_feature 1..5: note = RNA
  misc_feature 6..16: note = DNA
  misc_feature 17..21: note = RNA
  modified_base 17..21: mod_base = OTHER; note = 2'-O-(2-methoxyethyl) ribonucleotide
  modified_base 3: mod_base = OTHER; note = 5-methyl cytidine
  modified_base 7..9: mod_base = OTHER; note = 5-methyl cytidine
  modified_base 14: mod_base = OTHER; note = 5-methyl cytidine
  modified_base 17: mod_base = OTHER; note = 5-methyl cytidine
  modified_base 20..21: mod_base = OTHER; note = 5-methyl cytidine
tggctaccctttgcttctgcc

SEQ ID NO: 625 - DNA, 20 bp, synthetic construct
  source 1..20: mol_type = other DNA
  modified_base 1..20: mod_base = OTHER; note = Phosphorothioate linkage
  modified_base 1..5: mod_base = OTHER; note = 2'-O-(2-methoxyethyl) ribonucleotide
  misc_feature 1..5: note = RNA
  misc_feature 6..15: note = DNA
  misc_feature 16..20: note = RNA
  modified_base 16..20: mod_base = OTHER; note = 2'-O-(2-methoxyethyl) ribonucleotide
  modified_base 13: mod_base = OTHER; note = 5-methyl cytidine
tggagtgagaggcatttagg

SEQ ID NO: 626 - DNA, 20 bp, synthetic construct
  source 1..20: mol_type = other DNA
  modified_base 1..20: mod_base = OTHER; note = Phosphorothioate linkage
  modified_base 1..5: mod_base = OTHER; note = 2'-O-(2-methoxyethyl) ribonucleotide
  misc_feature 1..5: note = RNA
  misc_feature 6..15: note = DNA
  misc_feature 16..20: note = RNA
  modified_base 16..20: mod_base = OTHER; note = 2'-O-(2-methoxyethyl) ribonucleotide
  modified_base 5: mod_base = OTHER; note = 5-methyl cytidine
  modified_base 18: mod_base = OTHER; note = 5-methyl cytidine
aaggctggagtgagaggcat

SEQ ID NO: 627 - RNA, 20 nt, synthetic construct
  source 1..20: mol_type = other RNA
  modified_base 1..20: mod_base = OTHER; note = Phosphorothioate linkage
  modified_base 1..20: mod_base = OTHER; note = 2'-O-(2-methoxyethyl) ribonucleotide
  modified_base 6: mod_base = OTHER; note = 5-methyl cytidine
  modified_base 8: mod_base = OTHER; note = 5-methyl cytidine
  modified_base 15: mod_base = OTHER; note = 5-methyl cytidine
  modified_base 17: mod_base = OTHER; note = 5-methyl cytidine
tgtttctcgtatgtcactga

SEQ ID NO: 628 - RNA, 20 nt, synthetic construct
  source 1..20: mol_type = other RNA
  modified_base 1..20: mod_base = OTHER; note = Phosphorothioate linkage
  modified_base 1..20: mod_base = OTHER; note = 2'-O-(2-methoxyethyl) ribonucleotide
  modified_base 8: mod_base = OTHER; note = 5-methyl cytidine
  modified_base 10: mod_base = OTHER; note = 5-methyl cytidine
  modified_base 17: mod_base = OTHER; note = 5-methyl cytidine
  modified_base 19: mod_base = OTHER; note = 5-methyl cytidine
tatgtttctcgtatgtcact

SEQ ID NO: 629 - RNA, 20 nt, synthetic construct
  source 1..20: mol_type = other RNA
  modified_base 1..20: mod_base = OTHER; note = Phosphorothioate linkage
  modified_base 1..20: mod_base = OTHER; note = 2'-O-(2-methoxyethyl) ribonucleotide
  modified_base 10: mod_base = OTHER; note = 5-methyl cytidine
  modified_base 12: mod_base = OTHER; note = 5-methyl cytidine
  modified_base 19: mod_base = OTHER; note = 5-methyl cytidine
agtatgtttctcgtatgtca

SEQ ID NO: 630 - RNA, 20 nt, synthetic construct
  source 1..20: mol_type = other RNA
  modified_base 1..20: mod_base = OTHER; note = Phosphorothioate linkage
  modified_base 1..20: mod_base = OTHER; note = 2'-O-(2-methoxyethyl) ribonucleotide
  modified_base 12: mod_base = OTHER; note = 5-methyl cytidine
  modified_base 14: mod_base = OTHER; note = 5-methyl cytidine
tgagtatgtttctcgtatgt

SEQ ID NO: 631 - RNA, 20 nt, synthetic construct
  source 1..20: mol_type = other RNA
  modified_base 1..20: mod_base = OTHER; note = Phosphorothioate linkage
  modified_base 1..20: mod_base = OTHER; note = 2'-O-(2-methoxyethyl) ribonucleotide
  modified_base 2: mod_base = OTHER; note = 5-methyl cytidine
  modified_base 14: mod_base = OTHER; note = 5-methyl cytidine
  modified_base 16: mod_base = OTHER; note = 5-methyl cytidine
tctgagtatgtttctcgtat

SEQ ID NO: 632 - RNA, 20 nt, synthetic construct
  source 1..20: mol_type = other RNA
  modified_base 1..20: mod_base = OTHER; note = Phosphorothioate linkage
  modified_base 1..20: mod_base = OTHER; note = 2'-O-(2-methoxyethyl) ribonucleotide
  modified_base 4: mod_base = OTHER; note = 5-methyl cytidine
  modified_base 6: mod_base = OTHER; note = 5-methyl cytidine
  modified_base 18: mod_base = OTHER; note = 5-methyl cytidine
  modified_base 20: mod_base = OTHER; note = 5-methyl cytidine
ttgctctgagtatgtttctc

SEQ ID NO: 633 - RNA, 20 nt, synthetic construct
  source 1..20: mol_type = other RNA
  modified_base 1..20: mod_base = OTHER; note = Phosphorothioate linkage
  modified_base 1..20: mod_base = OTHER; note = 2'-O-(2-methoxyethyl) ribonucleotide
  modified_base 7: mod_base = OTHER; note = 5-methyl cytidine
  modified_base 9..10: mod_base = OTHER; note = 5-methyl cytidine
  modified_base 12: mod_base = OTHER; note = 5-methyl cytidine
  modified_base 17: mod_base = OTHER; note = 5-methyl cytidine
  modified_base 19: mod_base = OTHER; note = 5-methyl cytidine
atttgtctccacaaaactct

SEQ ID NO: 634 - RNA, 20 nt, synthetic construct
  source 1..20: mol_type = other RNA
  modified_base 1..20: mod_base = OTHER; note = Phosphorothioate linkage
  modified_base 1..20: mod_base = OTHER; note = 2'-O-(2-methoxyethyl) ribonucleotide
  modified_base 10: mod_base = OTHER; note = 5-methyl cytidine
  modified_base 12..13: mod_base = OTHER; note = 5-methyl cytidine
  modified_base 15: mod_base = OTHER; note = 5-methyl cytidine
  modified_base 20: mod_base = OTHER; note = 5-methyl cytidine
ggtatttgtctccacaaaac

SEQ ID NO: 635 - RNA, 20 nt, synthetic construct
  source 1..20: mol_type = other RNA
  modified_base 1..20: mod_base = OTHER; note = Phosphorothioate linkage
  modified_base 1..20: mod_base = OTHER; note = 2'-O-(2-methoxyethyl) ribonucleotide
  modified_base 15: mod_base = OTHER; note = 5-methyl cytidine
  modified_base 17..18: mod_base = OTHER; note = 5-methyl cytidine
  modified_base 20: mod_base = OTHER; note = 5-methyl cytidine
tttagggtatttgtctccac

SEQ ID NO: 636 - RNA, 20 nt, synthetic construct
  source 1..20: mol_type = other RNA
  modified_base 1..20: mod_base = OTHER; note = Phosphorothioate linkage
  modified_base 1..20: mod_base = OTHER; note = 2'-O-(2-methoxyethyl) ribonucleotide
  modified_base 5: mod_base = OTHER; note = 5-methyl cytidine
tgttcttttagggtatttgt

SEQ ID NO: 637 - DNA, 20 bp, synthetic construct
  source 1..20: mol_type = other DNA
  modified_base 1..20: mod_base = OTHER; note = Phosphorothioate linkage
  modified_base 1..5: mod_base = OTHER; note = 2'-O-(2-methoxyethyl) ribonucleotide
  misc_feature 1..5: note = RNA
  misc_feature 6..15: note = DNA
  misc_feature 16..20: note = RNA
  modified_base 16..20: mod_base = OTHER; note = 2'-O-(2-methoxyethyl) ribonucleotide
  modified_base 2: mod_base = OTHER; note = 5-methyl cytidine
  modified_base 9: mod_base = OTHER; note = 5-methyl cytidine
gctgaaggctggagtgagag

SEQ ID NO: 638 - DNA, 20 bp, synthetic construct
  source 1..20: mol_type = other DNA
  modified_base 1..20: mod_base = OTHER; note = Phosphorothioate linkage
  modified_base 1..5: mod_base = OTHER; note = 2'-O-(2-methoxyethyl) ribonucleotide
  misc_feature 1..5: note = RNA
  misc_feature 6..15: note = DNA
  misc_feature 16..20: note = RNA
  modified_base 16..20: mod_base = OTHER; note = 2'-O-(2-methoxyethyl) ribonucleotide
  modified_base 3: mod_base = OTHER; note = 5-methyl cytidine
  modified_base 10: mod_base = OTHER; note = 5-methyl cytidine
tgctgaaggctggagtgaga

SEQ ID NO: 639 - DNA, 20 bp, synthetic construct
  source 1..20: mol_type = other DNA
  modified_base 1..20: mod_base = OTHER; note = Phosphorothioate linkage
  modified_base 1..5: mod_base = OTHER; note = 2'-O-(2-methoxyethyl) ribonucleotide
  misc_feature 1..5: note = RNA
  misc_feature 6..15: note = DNA
  misc_feature 16..20: note = RNA
  modified_base 16..20: mod_base = OTHER; note = 2'-O-(2-methoxyethyl) ribonucleotide
  modified_base 1: mod_base = OTHER; note = 5-methyl cytidine
  modified_base 6: mod_base = OTHER; note = 5-methyl cytidine
  modified_base 13: mod_base = OTHER; note = 5-methyl cytidine
cattgctgaaggctggagtg

SEQ ID NO: 640 - DNA, 20 bp, synthetic construct
  source 1..20: mol_type = other DNA
  modified_base 1..20: mod_base = OTHER; note = Phosphorothioate linkage
  modified_base 1..5: mod_base = OTHER; note = 2'-O-(2-methoxyethyl) ribonucleotide
  misc_feature 1..5: note = RNA
  misc_feature 6..15: note = DNA
  misc_feature 16..20: note = RNA
  modified_base 16..20: mod_base = OTHER; note = 2'-O-(2-methoxyethyl) ribonucleotide
  modified_base 5: mod_base = OTHER; note = 5-methyl cytidine
  modified_base 7: mod_base = OTHER; note = 5-methyl cytidine
  modified_base 11..13: mod_base = OTHER; note = 5-methyl cytidine
  modified_base 16: mod_base = OTHER; note = 5-methyl cytidine
gaagcactggcccatcaatt

SEQ ID NO: 641 - DNA, 20 bp, synthetic construct
  source 1..20: mol_type = other DNA
  modified_base 1..20: mod_base = OTHER; note = Phosphorothioate linkage
  modified_base 1..5: mod_base = OTHER; note = 2'-O-(2-methoxyethyl) ribonucleotide
  misc_feature 1..5: note = RNA
  misc_feature 6..15: note = DNA
  misc_feature 16..20: note = RNA
  modified_base 16..20: mod_base = OTHER; note = 2'-O-(2-methoxyethyl) ribonucleotide
  modified_base 7: mod_base = OTHER; note = 5-methyl cytidine
  modified_base 9: mod_base = OTHER; note = 5-methyl cytidine
  modified_base 13..15: mod_base = OTHER; note = 5-methyl cytidine
  modified_base 18: mod_base = OTHER; note = 5-methyl cytidine
aagaagcactggcccatcaa

SEQ ID NO: 642 - DNA, 20 bp, synthetic construct
  source 1..20: mol_type = other DNA
  modified_base 1..20: mod_base = OTHER; note = Phosphorothioate linkage
  modified_base 1..5: mod_base = OTHER; note = 2'-O-(2-methoxyethyl) ribonucleotide
  misc_feature 1..5: note = RNA
  misc_feature 6..15: note = DNA
  misc_feature 16..20: note = RNA
  modified_base 16..20: mod_base = OTHER; note = 2'-O-(2-methoxyethyl) ribonucleotide
  modified_base 12: mod_base = OTHER; note = 5-methyl cytidine
  modified_base 14: mod_base = OTHER; note = 5-methyl cytidine
  modified_base 18..20: mod_base = OTHER; note = 5-methyl cytidine
aaattaagaagcactggccc

SEQ ID NO: 643 - DNA, 20 bp, synthetic construct
  source 1..20: mol_type = other DNA
  modified_base 1..20: mod_base = OTHER; note = Phosphorothioate linkage
  modified_base 1..5: mod_base = OTHER; note = 2'-O-(2-methoxyethyl) ribonucleotide
  misc_feature 1..5: note = RNA
  misc_feature 6..15: note = DNA
  misc_feature 16..20: note = RNA
  modified_base 16..20: mod_base = OTHER; note = 2'-O-(2-methoxyethyl) ribonucleotide
  modified_base 3: mod_base = OTHER; note = 5-methyl cytidine
  modified_base 15: mod_base = OTHER; note = 5-methyl cytidine
  modified_base 17: mod_base = OTHER; note = 5-methyl cytidine
tgcaaattaagaagcactgg

SEQ ID NO: 644 - DNA, 20 bp, synthetic construct
  source 1..20: mol_type = other DNA
  modified_base 1..3: mod_base = OTHER; note = Phosphorothioate linkage
  modified_base 4..8: mod_base = OTHER; note = Phosphorothioate linkage
  modified_base 9..13: mod_base = OTHER; note = Phosphorothioate linkage
  modified_base 14..18: mod_base = OTHER; note = Phosphorothioate linkage
  modified_base 19..20: mod_base = OTHER; note = Phosphorothioate linkage
  modified_base 1..5: mod_base = OTHER; note = 2'-O-(2-methoxyethyl) ribonucleotide
  misc_feature 1..5: note = RNA
  misc_feature 6..15: note = DNA
  misc_feature 16..20: note = RNA
  modified_base 16..20: mod_base = OTHER; note = 2'-O-(2-methoxyethyl) ribonucleotide
  modified_base 3: mod_base = OTHER; note = 5-methyl cytidine
  modified_base 15: mod_base = OTHER; note = 5-methyl cytidine
  modified_base 17: mod_base = OTHER; note = 5-methyl cytidine
tgttttgcttggtcaagagg

SEQ ID NO: 645 - RNA, 20 nt, synthetic construct
  source 1..20: mol_type = other RNA
ggaatttatagttttcacct

SEQ ID NO: 646 - RNA, 20 nt, synthetic construct
  source 1..20: mol_type = other RNA
tcagaggaatttatagtttt

SEQ ID NO: 647 - RNA, 20 nt, synthetic construct
  source 1..20: mol_type = other RNA
ggctccctcagaggaattta

SEQ ID NO: 648 - RNA, 20 nt, synthetic construct
  source 1..20: mol_type = other RNA
ggaatggctccctcagagga

SEQ ID NO: 649 - RNA, 20 nt, synthetic construct
  source 1..20: mol_type = other RNA
acactaggaatggctccctc

SEQ ID NO: 650 - RNA, 20 nt, synthetic construct
  source 1..20: mol_type = other RNA
gaaagacactaggaatggct

SEQ ID NO: 651 - RNA, 20 nt, synthetic construct
  source 1..20: mol_type = other RNA
cttggctagaaagacactag

SEQ ID NO: 652 - RNA, 20 nt, synthetic construct
  source 1..20: mol_type = other RNA
gcacatcttggctagaaaga

SEQ ID NO: 653 - RNA, 20 nt, synthetic construct
  source 1..20: mol_type = other RNA
gtggggcacatcttggctag

SEQ ID NO: 654 - RNA, 20 nt, synthetic construct
  source 1..20: mol_type = other RNA
gaatcaagggtggggcacat

SEQ ID NO: 655 - RNA, 20 nt, synthetic construct
  source 1..20: mol_type = other RNA
gttcaagaatcaagggtggg

SEQ ID NO: 656 - RNA, 20 nt, synthetic construct
  source 1..20: mol_type = other RNA
attcaggttcaagaatcaag

SEQ ID NO: 657 - RNA, 20 nt, synthetic construct
  source 1..20: mol_type = other RNA
cccacatattcaggttcaag

SEQ ID NO: 658 - RNA, 20 nt, synthetic construct
  source 1..20: mol_type = other RNA
taggaacccacatattcagg

SEQ ID NO: 659 - RNA, 20 nt, synthetic construct
  source 1..20: mol_type = other RNA
ttatttgcacataggaaccc

SEQ ID NO: 660 - RNA, 20 nt, synthetic construct
  source 1..20: mol_type = other RNA
acagcttatttgcacatagg

SEQ ID NO: 661 - RNA, 20 nt, synthetic construct
  source 1..20: mol_type = other RNA
tcagaacagcttatttgcac

SEQ ID NO: 662 - RNA, 20 nt, synthetic construct
  source 1..20: mol_type = other RNA
tggctcaagttcagaacagc

SEQ ID NO: 663 - RNA, 20 nt, synthetic construct
  source 1..20: mol_type = other RNA
ctcatgctggctcaagttca

SEQ ID NO: 664 - RNA, 20 nt, synthetic construct
  source 1..20: mol_type = other RNA
gtgtgcctcatgctggctca

SEQ ID NO: 665 - RNA, 20 nt, synthetic construct
  source 1..20: mol_type = other RNA
ctttgcagtgtgcctcatgc

SEQ ID NO: 666 - RNA, 20 nt, synthetic construct
  source 1..20: mol_type = other RNA
gcatggcctttgcagtgtgc

SEQ ID NO: 667 - RNA, 20 nt, synthetic construct
  source 1..20: mol_type = other RNA
gtcatagcatggcctttgca

SEQ ID NO: 668 - RNA, 20 nt, synthetic construct
  source 1..20: mol_type = other RNA
actcactgtcatagcatggc

SEQ ID NO: 669 - RNA, 20 nt, synthetic construct
  source 1..20: mol_type = other RNA
gggctgactcactgtcatag

SEQ ID NO: 670 - RNA, 20 nt, synthetic construct
  source 1..20: mol_type = other RNA
actcagggctgactcactgt

SEQ ID NO: 671 - RNA, 20 nt, synthetic construct
  source 1..20: mol_type = other RNA
cgtgtactcagggctgactc

SEQ ID NO: 672 - RNA, 20 nt, synthetic construct
  source 1..20: mol_type = other RNA
gtctgtcgtgtactcagggc

SEQ ID NO: 673 - RNA, 20 nt, synthetic construct
  source 1..20: mol_type = other RNA
agtgagtctgtcgtgtactc

SEQ ID NO: 674 - RNA, 20 nt, synthetic construct
  source 1..20: mol_type = other RNA
tgtaatcagtgagtctgtcg

SEQ ID NO: 675 - RNA, 20 nt, synthetic construct
  source 1..20: mol_type = other RNA
gccaccttgtaatcagtgag

SEQ ID NO: 676 - RNA, 20 nt, synthetic construct
  source 1..20: mol_type = other RNA
tgacaggccaccttgtaatc

SEQ ID NO: 677 - RNA, 20 nt, synthetic construct
  source 1..20: mol_type = other RNA
tgataagcctgacaggccac

SEQ ID NO: 678 - RNA, 20 nt, synthetic construct
  source 1..20: mol_type = other RNA
ttctttgtgataagcctgac

SEQ ID NO: 679 - RNA, 20 nt, synthetic construct
  source 1..20: mol_type = other RNA
ctgttttctttgtgataagc

SEQ ID NO: 680 - RNA, 20 nt, synthetic construct
  source 1..20: mol_type = other RNA
tatgctactgttttctttgt

SEQ ID NO: 681 - RNA, 20 nt, synthetic construct
  source 1..20: mol_type = other RNA
gtcactatgctactgttttc

SEQ ID NO: 682 - RNA, 20 nt, synthetic construct
  source 1..20: mol_type = other RNA
acacagtcactatgctactg

SEQ ID NO: 683 - RNA, 20 nt, synthetic construct
  source 1..20: mol_type = other RNA
cacagacacagtcactatgc

SEQ ID NO: 684 - RNA, 20 nt, synthetic construct
  source 1..20: mol_type = other RNA
gaactcacacagacacagtc

SEQ ID NO: 685 - RNA, 20 nt, synthetic construct
  source 1..20: mol_type = other RNA
gtagccagaactcacacaga

SEQ ID NO: 686 - RNA, 20 nt, synthetic construct
  source 1..20: mol_type = other RNA
cgcagaagtagccagaactc

SEQ ID NO: 687 - RNA, 20 nt, synthetic construct
  source 1..20: mol_type = other RNA
gcaaccacgcagaagtagcc

SEQ ID NO: 688 - RNA, 20 nt, synthetic construct
  source 1..20: mol_type = other RNA
cagaggcaaccacgcagaag

SEQ ID NO: 689 - RNA, 20 nt, synthetic construct
  source 1..20: mol_type = other RNA
gtgatcagaggcaaccacgc

SEQ ID NO: 690 - RNA, 20 nt, synthetic construct
  source 1..20: mol_type = other RNA
gtgctgtgatcagaggcaac

SEQ ID NO: 691 - RNA, 20 nt, synthetic construct
  source 1..20: mol_type = other RNA
actagggcagtgctgtgatc

SEQ ID NO: 692 - RNA, 20 nt, synthetic construct
  source 1..20: mol_type = other RNA
agaaaactagggcagtgctg

SEQ ID NO: 693 - RNA, 20 nt, synthetic construct
  source 1..20: mol_type = other RNA
aggcgtgagaaaactagggc

SEQ ID NO: 694 - RNA, 20 nt, synthetic construct
  source 1..20: mol_type = other RNA
aatctcctcaggtcatctgc

SEQ ID NO: 695 - RNA, 20 nt, synthetic construct
  source 1..20: mol_type = other RNA
gtagttgagtttgttttttt

SEQ ID NO: 696 - RNA, 20 nt, synthetic construct
  source 1..20: mol_type = other RNA
caaccagtagttgagtttgt

SEQ ID NO: 697 - RNA, 20 nt, synthetic construct
  source 1..20: mol_type = other RNA
ctagtctcaaccagtagttg

SEQ ID NO: 698 - RNA, 20 nt, synthetic construct
  source 1..20: mol_type = other RNA
gtacactagtctcaaccagt

SEQ ID NO: 699 - RNA, 20 nt, synthetic construct
  source 1..20: mol_type = other RNA
gtaaggtacactagtctcaa

SEQ ID NO: 700 - RNA, 20 nt, synthetic construct
  source 1..20: mol_type = other RNA
ctttgagtaaggtacactag

SEQ ID NO: 701 - RNA, 20 nt, synthetic construct
  source 1..20: mol_type = other RNA
tgcattactttgagtaaggt

SEQ ID NO: 702 - RNA, 20 nt, synthetic construct
  source 1..20: mol_type = other RNA
caggctgcattactttgagt

SEQ ID NO: 703 - RNA, 20 nt, synthetic construct
  source 1..20: mol_type = other RNA
tcatgaacaggctgcattac

SEQ ID NO: 704 - RNA, 20 nt, synthetic construct
  source 1..20: mol_type = other RNA
gaatttcatgaacaggctgc

SEQ ID NO: 705 - RNA, 20 nt, synthetic construct
  source 1..20: mol_type = other RNA
gtaatgggaatttcatgaac

SEQ ID NO: 706 - RNA, 20 nt, synthetic construct
  source 1..20: mol_type = other RNA
ccatctgtaatgggaatttc

SEQ ID NO: 707 - RNA, 20 nt, synthetic construct
  source 1..20: mol_type = other RNA
acccttccatctgtaatggg

SEQ ID NO: 708 - RNA, 20 nt, synthetic construct
  source 1..20: mol_type = other RNA
gatcttaacccttccatctg

SEQ ID NO: 709 - RNA, 20 nt, synthetic construct
  source 1..20: mol_type = other RNA
ccacttgatcttaacccttc

SEQ ID NO: 710 - RNA, 20 nt, synthetic construct
  source 1..20: mol_type = other RNA
gtgatccacttgatcttaac

SEQ ID NO: 711 - RNA, 20 nt, synthetic construct
  source 1..20: mol_type = other RNA
tggctggtgatccacttgat

SEQ ID NO: 712 - RNA, 20 nt, synthetic construct
  source 1..20: mol_type = other RNA
gtggctgtggctggtgatcc

SEQ ID NO: 713 - RNA, 20 nt, synthetic construct
  source 1..20: mol_type = other RNA
ttagctttgtggctgtggct

SEQ ID NO: 714 - RNA, 20 nt, synthetic construct
  source 1..20: mol_type = other RNA
tctgccccttagctttgtgg

SEQ ID NO: 715 - RNA, 20 nt, synthetic construct
  source 1..20: mol_type = other RNA
tcccctctgccccttagctt

SEQ ID NO: 716 - RNA, 20 nt, synthetic construct
  source 1..20: mol_type = other RNA
ccaactcccctctgcccctt

SEQ ID NO: 717 - RNA, 20 nt, synthetic construct
  source 1..20: mol_type = other RNA
cccccaccaactcccctctg

SEQ ID NO: 718 - RNA, 20 nt, synthetic construct
  source 1..20: mol_type = other RNA
atttttcccccccaccaact

SEQ ID NO: 719 - RNA, 20 nt, synthetic construct
  source 1..20: mol_type = other RNA
gagttctatttttccccccc

SEQ ID NO: 720 - RNA, 20 nt, synthetic construct
  source 1..20: mol_type = other RNA
tcatctccaagagttctatt

SEQ ID NO: 721 - RNA, 20 nt, synthetic construct
  source 1..20: mol_type = other RNA
gagtatcatctccaagagtt

SEQ ID NO: 722 - RNA, 20 nt, synthetic construct
  source 1..20: mol_type = other RNA
tttacttgagtatcatctcc

SEQ ID NO: 723 - RNA, 20 nt, synthetic construct
  source 1..20: mol_type = other RNA
cccatgaattttacttgagt

SEQ ID NO: 724 - RNA, 20 nt, synthetic construct
  source 1..20: mol_type = other RNA
ggaggtgacccatgaatttt

SEQ ID NO: 725 - RNA, 20 nt, synthetic construct
  source 1..20: mol_type = other RNA
actagggaggtgacccatga

SEQ ID NO: 726 - RNA, 20 nt, synthetic construct
  source 1..20: mol_type = other RNA
acgtcactagggaggtgacc

SEQ ID NO: 727 - RNA, 20 nt, synthetic construct
  source 1..20: mol_type = other RNA
acttaacgtcactagggagg

SEQ ID NO: 728 - RNA, 20 nt, synthetic construct
  source 1..20: mol_type = other RNA
ccaatacttaacgtcactag

SEQ ID NO: 729 - RNA, 20 nt, synthetic construct
  source 1..20: mol_type = other RNA
cactaccaatacttaacgtc

SEQ ID NO: 730 - RNA, 20 nt, synthetic construct
  source 1..20: mol_type = other RNA
gcatgacactaccaatactt

SEQ ID NO: 731 - RNA, 20 nt, synthetic construct
  source 1..20: mol_type = other RNA
ggcttgagcatgacactacc

SEQ ID NO: 732 - RNA, 20 nt, synthetic construct
  source 1..20: mol_type = other RNA
agtataggcttgagcatgac

SEQ ID NO: 733 - RNA, 20 nt, synthetic construct
  source 1..20: mol_type = other RNA
tattgagtataggcttgagc

SEQ ID NO: 734 - RNA, 20 nt, synthetic construct
  source 1..20: mol_type = other RNA
accactttattgagtatagg

SEQ ID NO: 735 - RNA, 20 nt, synthetic construct
  source 1..20: mol_type = other RNA
atgttaccactttattgagt

SEQ ID NO: 736 - RNA, 20 nt, synthetic construct
  source 1..20: mol_type = other RNA
gccaaaatgttaccacttta

SEQ ID NO: 737 - RNA, 20 nt, synthetic construct
  source 1..20: mol_type = other RNA
tacattgccaaaatgttacc

SEQ ID NO: 738 - RNA, 20 nt, synthetic construct
  source 1..20: mol_type = other RNA
accaaatacattgccaaaat

SEQ ID NO: 739 - RNA, 20 nt, synthetic construct
  source 1..20: mol_type = other RNA
cactcaccaaatacattgcc

SEQ ID NO: 740 - RNA, 20 nt, synthetic construct
  source 1..20: mol_type = other RNA
gaaagtcactcaccaaatac

SEQ ID NO: 741 - RNA, 20 nt, synthetic construct
  source 1..20: mol_type = other RNA
caggattgaaagtcactcac

SEQ ID NO: 742 - RNA, 20 nt, synthetic construct
  source 1..20: mol_type = other RNA
tagaaacaggattgaaagtc

SEQ ID NO: 743 - RNA, 20 nt, synthetic construct
  source 1..20: mol_type = other RNA
tcttaatagaaacaggattg

SEQ ID NO: 744 - RNA, 20 nt, synthetic construct
  source 1..20: mol_type = other RNA
ttactatgttttaaaatctt

SEQ ID NO: 745 - RNA, 20 nt, synthetic construct
  source 1..20: mol_type = other RNA
ctatcttactatgttttaaa

SEQ ID NO: 746 - RNA, 20 nt, synthetic construct
  source 1..20: mol_type = other RNA
caagtttccttctatcttac

SEQ ID NO: 747 - RNA, 20 nt, synthetic construct
  source 1..20: mol_type = other RNA
tgcctcaagtttccttctat

SEQ ID NO: 748 - RNA, 20 nt, synthetic construct
  source 1..20: mol_type = other RNA
tactctgcctcaagtttcct

SEQ ID NO: 749 - RNA, 20 nt, synthetic construct
  source 1..20: mol_type = other RNA
tttctagaaattactctgcc

SEQ ID NO: 750 - RNA, 20 nt, synthetic construct
  source 1..20: mol_type = other RNA
gagtttacccatatttctag

SEQ ID NO: 751 - RNA, 20 nt, synthetic construct
  source 1..20: mol_type = other RNA
aacatgagtttacccatatt

SEQ ID NO: 752 - RNA, 20 nt, synthetic construct
  source 1..20: mol_type = other RNA
atagaaacatgagtttaccc

SEQ ID NO: 753 - RNA, 20 nt, synthetic construct
  source 1..20: mol_type = other RNA
aaagagaatagaaacatgag

SEQ ID NO: 754 - RNA, 20 nt, synthetic construct
  source 1..20: mol_type = other RNA
atctaacacaaagagaatag

SEQ ID NO: 755 - RNA, 20 nt, synthetic construct
  source 1..20: mol_type = other RNA
gtggtatctaacacaaagag

SEQ ID NO: 756 - RNA, 20 nt, synthetic construct
  source 1..20: mol_type = other RNA
gctggagtggtatctaacac

SEQ ID NO: 757 - RNA, 20 nt, synthetic construct
  source 1..20: mol_type = other RNA
ggctgagctggagtggtatc

SEQ ID NO: 758 - RNA, 20 nt, synthetic construct
  source 1..20: mol_type = other RNA
tttactggctgagctggagt

SEQ ID NO: 759 - RNA, 20 nt, synthetic construct
  source 1..20: mol_type = other RNA
ggggattttactggctgagc

SEQ ID NO: 760 - RNA, 20 nt, synthetic construct
  source 1..20: mol_type = other RNA
tatagaggggattttactgg

SEQ ID NO: 761 - RNA, 20 nt, synthetic construct
  source 1..20: mol_type = other RNA
tcaaaatgtatagaggggat

SEQ ID NO: 762 - RNA, 20 nt, synthetic construct
  source 1..20: mol_type = other RNA
gtaattcaaaatgtatagag

SEQ ID NO: 763 - RNA, 20 nt, synthetic construct
  source 1..20: mol_type = other RNA
atatcttaaattgtaattca

SEQ ID NO: 764 - RNA, 20 nt, synthetic construct
  source 1..20: mol_type = other RNA
ttgctcatatcttaaattgt

SEQ ID NO: 765 - RNA, 20 nt, synthetic construct
  source 1..20: mol_type = other RNA
acttttttgctcatatctta

SEQ ID NO: 766 - RNA, 20 nt, synthetic construct
  source 1..20: mol_type = other RNA
aattttttacttttttgctc

SEQ ID NO: 767 - RNA, 20 nt, synthetic construct
  source 1..20: mol_type = other RNA
acgttgtgggtaggttgttt

SEQ ID NO: 768 - RNA, 20 nt, synthetic construct
  source 1..20: mol_type = other RNA
atggaacacgttgtgggtag

SEQ ID NO: 769 - RNA, 20 nt, synthetic construct
  source 1..20: mol_type = other RNA
catgacaaatggaacacgtt

SEQ ID NO: 770 - RNA, 20 nt, synthetic construct
  source 1..20: mol_type = other RNA
accagaacatgacaaatgga

SEQ ID NO: 771 - RNA, 20 nt, synthetic construct
  source 1..20: mol_type = other RNA
tccctcaaccagaacatgac

SEQ ID NO: 772 - RNA, 20 nt, synthetic construct
  source 1..20: mol_type = other RNA
ctaacagttccctcaaccag

SEQ ID NO: 773 - RNA, 20 nt, synthetic construct
  source 1..20: mol_type = other RNA
tatggactaacagttccctc

SEQ ID NO: 774 - RNA, 20 nt, synthetic construct
  source 1..20: mol_type = other RNA
acaccattgtatggactaac

SEQ ID NO: 775 - RNA, 20 nt, synthetic construct
  source 1..20: mol_type = other RNA
gtgtgaataacaccattgta

SEQ ID NO: 776 - RNA, 20 nt, synthetic construct
  source 1..20: mol_type = other RNA
tccaggaaaagcatgtgtga

SEQ ID NO: 777 - RNA, 20 nt, synthetic construct
  source 1..20: mol_type = other RNA
ccagattccaggaaaagcat

SEQ ID NO: 778 - RNA, 20 nt, synthetic construct
  source 1..20: mol_type = other RNA
aagaactccagattccagga

SEQ ID NO: 779 - RNA, 20 nt, synthetic construct
  source 1..20: mol_type = other RNA
agttacaagaactccagatt

SEQ ID NO: 780 - RNA, 20 nt, synthetic construct
  source 1..20: mol_type = other RNA
cgacgttgagttacaagaac

SEQ ID NO: 781 - RNA, 20 nt, synthetic construct
  source 1..20: mol_type = other RNA
attgactacgacgttgagtt

SEQ ID NO: 782 - RNA, 20 nt, synthetic construct
  source 1..20: mol_type = other RNA
tgtttttattgactacgacg

SEQ ID NO: 783 - RNA, 20 nt, synthetic construct
  source 1..20: mol_type = other RNA
tgacagatgtttttattgac

SEQ ID NO: 784 - RNA, 20 nt, synthetic construct
  source 1..20: mol_type = other RNA
cacaatgacagatgttttta

SEQ ID NO: 785 - RNA, 20 nt, synthetic construct
  source 1..20: mol_type = other RNA
tttggcacaatgacagatgt

SEQ ID NO: 786 - RNA, 20 nt, synthetic construct
  source 1..20: mol_type = other RNA
tactcatttttggcacaatg

SEQ ID NO: 787 - RNA, 20 nt, synthetic construct
  source 1..20: mol_type = other RNA
gcgtgctactcatttttggc

SEQ ID NO: 788 - RNA, 20 nt, synthetic construct
  source 1..20: mol_type = other RNA
gccaggcgtgctactcattt

SEQ ID NO: 789 - RNA, 20 nt, synthetic construct
  source 1..20: mol_type = other RNA
gcccagccaggcgtgctact

SEQ ID NO: 790 - RNA, 20 nt, synthetic construct
  source 1..20: mol_type = other RNA
ggaatagcccagccaggcgt

SEQ ID NO: 791 - RNA, 20 nt, synthetic construct
  source 1..20: mol_type = other RNA
atttctccatggaatagccc

SEQ ID NO: 792 - RNA, 20 nt, synthetic construct
  source 1..20: mol_type = other RNA
gtgtgcatttctccatggaa

SEQ ID NO: 793 - RNA, 20 nt, synthetic construct
  source 1..20: mol_type = other RNA
agtttgtgtgcatttctcca

SEQ ID NO: 794 - RNA, 20 nt, synthetic construct
  source 1..20: mol_type = other RNA
ttgtgggaagtttgtgtgca

SEQ ID NO: 795 - RNA, 20 nt, synthetic construct
  source 1..20: mol_type = other RNA
tgatgtttgtgggaagtttg

SEQ ID NO: 796 - RNA, 20 nt, synthetic construct
  source 1..20: mol_type = other RNA
ttggctgatgtttgtgggaa

SEQ ID NO: 797 - RNA, 20 nt, synthetic construct
  source 1..20: mol_type = other RNA
gacatttggctgatgtttgt

SEQ ID NO: 798 - RNA, 20 nt, synthetic construct
  source 1..20: mol_type = other RNA
caactgacatttggctgatg

SEQ ID NO: 799 - RNA, 20 nt, synthetic construct
  source 1..20: mol_type = other RNA
cttcatcaactgacatttgg

SEQ ID NO: 800 - RNA, 20 nt, synthetic construct
  source 1..20: mol_type = other RNA
tcggttttcttcatcaactg

SEQ ID NO: 801 - RNA, 20 nt, synthetic construct
  source 1..20: mol_type = other RNA
aagtttcggttttcttcatc

SEQ ID NO: 802 - RNA, 20 nt, synthetic construct
  source 1..20: mol_type = other RNA
ctttgtttttcaagtttcgg

SEQ ID NO: 803 - RNA, 20 nt, synthetic construct
  source 1..20: mol_type = other RNA
gaaccctttgtttttcaagt

SEQ ID NO: 804 - RNA, 20 nt, synthetic construct
  source 1..20: mol_type = other RNA
atgatctctgaaccctttgt

SEQ ID NO: 805 - RNA, 20 nt, synthetic construct
  source 1..20: mol_type = other RNA
ccatagatgatctctgaacc

SEQ ID NO: 806 - RNA, 20 nt, synthetic construct
  source 1..20: mol_type = other RNA
gctcttcacccatagatgat

SEQ ID NO: 807 - RNA, 20 nt, synthetic construct
  source 1..20: mol_type = other RNA
ctcctgctcttcacccatag

SEQ ID NO: 808 - RNA, 20 nt, synthetic construct
  source 1..20: mol_type = other RNA
ctacctctcctgctcttcac

SEQ ID NO: 809 - RNA, 20 nt, synthetic construct
  source 1..20: mol_type = other RNA
tagtcctcctacctctcctg

SEQ ID NO: 810 - RNA, 20 nt, synthetic construct
  source 1..20: mol_type = other RNA
actaaattaagtagtcctcc

SEQ ID NO: 811 - RNA, 20 nt, synthetic construct
  source 1..20: mol_type = other RNA
tagtaactaaattaagtagt

SEQ ID NO: 812 - RNA, 20 nt, synthetic construct
  source 1..20: mol_type = other RNA
tgagaatctagtaactaaat

SEQ ID NO: 813 - RNA, 20 nt, synthetic construct
  source 1..20: mol_type = other RNA
attcatgagaatctagtaac

SEQ ID NO: 814 - RNA, 20 nt, synthetic construct
  source 1..20: mol_type = other RNA
gagtactattcatgagaatc

SEQ ID NO: 815 - RNA, 20 nt, synthetic construct
  source 1..20: mol_type = other RNA
ggtgttgagtactattcatg

SEQ ID NO: 816 - RNA, 20 nt, synthetic construct
  source 1..20: mol_type = other RNA
gaaatttggtgttgagtact

SEQ ID NO: 817 - RNA, 20 nt, synthetic construct
  source 1..20: mol_type = other RNA
cccatgaaatttggtgttga

SEQ ID NO: 818 - RNA, 20 nt, synthetic construct
  source 1..20: mol_type = other RNA
gtgattcccatgaaatttgg

SEQ ID NO: 819 - RNA, 20 nt, synthetic construct
  source 1..20: mol_type = other RNA
caattaaggtgattcccatg

SEQ ID NO: 820 - RNA, 20 nt, synthetic construct
  source 1..20: mol_type = other RNA
tctgccactcaattaaggtg

SEQ ID NO: 821 - RNA, 20 nt, synthetic construct
  source 1..20: mol_type = other RNA
cgaactctgccactcaatta

SEQ ID NO: 822 - RNA, 20 nt, synthetic construct
  source 1..20: mol_type = other RNA
gtatacgaactctgccactc

SEQ ID NO: 823 - RNA, 20 nt, synthetic construct
  source 1..20: mol_type = other RNA
aattagtatacgaactctgc

SEQ ID NO: 824 - RNA, 20 nt, synthetic construct
  source 1..20: mol_type = other RNA
gccgtttatttcaatataat

SEQ ID NO: 825 - RNA, 20 nt, synthetic construct
  source 1..20: mol_type = other RNA
taccgtgccgtttatttcaa

SEQ ID NO: 826 - RNA, 20 nt, synthetic construct
  source 1..20: mol_type = other RNA
tgatgtaccgtgccgtttat

SEQ ID NO: 827 - RNA, 20 nt, synthetic construct
  source 1..20: mol_type = other RNA
ataattgatgtaccgtgccg

SEQ ID NO: 828 - RNA, 20 nt, synthetic construct
  source 1..20: mol_type = other RNA
tttagataattgatgtaccg

SEQ ID NO: 829 - RNA, 20 nt, synthetic construct
  source 1..20: mol_type = other RNA
agtctaatgttttagataat

SEQ ID NO: 830 - RNA, 20 nt, synthetic construct
  source 1..20: mol_type = other RNA
gtaagagtctaatgttttag

SEQ ID NO: 831 - RNA, 20 nt, synthetic construct
  source 1..20: mol_type = other RNA
acaatgtaagagtctaatgt

SEQ ID NO: 832 - RNA, 20 nt, synthetic construct
  source 1..20: mol_type = other RNA
gatctaacaatgtaagagtc

SEQ ID NO: 833 - RNA, 20 nt, synthetic construct
  source 1..20: mol_type = other RNA
tataacatgatctaacaatg

SEQ ID NO: 834 - RNA, 20 nt, synthetic construct
  source 1..20: mol_type = other RNA
ggaaatttataacatgatct

SEQ ID NO: 835 - RNA, 20 nt, synthetic construct
  source 1..20: mol_type = other RNA
gagcaggaaatttataacat

SEQ ID NO: 836 - RNA, 20 nt, synthetic construct
  source 1..20: mol_type = other RNA
gaatgaattcagagagcagg

SEQ ID NO: 837 - RNA, 20 nt, synthetic construct
  source 1..20: mol_type = other RNA
taaacagaatgaattcagag

SEQ ID NO: 838 - RNA, 20 nt, synthetic construct
  source 1..20: mol_type = other RNA
tcctgaaataaacagaatga

SEQ ID NO: 839 - RNA, 20 nt, synthetic construct
  source 1..20: mol_type = other RNA
tcagctcctgaaataaacag

SEQ ID NO: 840 - RNA, 20 nt, synthetic construct
  source 1..20: mol_type = other RNA
cgaaagtcagctcctgaaat

SEQ ID NO: 841 - RNA, 20 nt, synthetic construct
  source 1..20: mol_type = other RNA
taaaaacgaaagtcagctcc

SEQ ID NO: 842 - RNA, 20 nt, synthetic construct
  source 1..20: mol_type = other RNA
gagtagctaaaaacgaaagt

SEQ ID NO: 843 - RNA, 20 nt, synthetic construct
  source 1..20: mol_type = other RNA
tagatgagtagctaaaaacg

SEQ ID NO: 844 - RNA, 20 nt, synthetic construct
  source 1..20: mol_type = other RNA
ctaagttgtagatgagtagc

SEQ ID NO: 845 - RNA, 20 nt, synthetic construct
  source 1..20: mol_type = other RNA
ttcccctaagttgtagatga

SEQ ID NO: 846 - RNA, 20 nt, synthetic construct
  source 1..20: mol_type = other RNA
gattattttcccctaagttg

SEQ ID NO: 847 - RNA, 20 nt, synthetic construct
  source 1..20: mol_type = other RNA
aatgacagtgattattttcc

SEQ ID NO: 848 - RNA, 20 nt, synthetic construct
  source 1..20: mol_type = other RNA
gcatcaatgacagtgattat

SEQ ID NO: 849 - RNA, 20 nt, synthetic construct
  source 1..20: mol_type = other RNA
caatggcatcaatgacagtg

SEQ ID NO: 850 - RNA, 20 nt, synthetic construct
  source 1..20: mol_type = other RNA
ttatctacttggcaatggca

SEQ ID NO: 851 - RNA, 20 nt, synthetic construct
  source 1..20: mol_type = other RNA
acacagtttatctacttggc

SEQ ID NO: 852 - RNA, 20 nt, synthetic construct
  source 1..20: mol_type = other RNA
gccccacacagtttatctac

SEQ ID NO: 853 - RNA, 20 nt, synthetic construct
  source 1..20: mol_type = other RNA
tctcaatgccccacacagtt

SEQ ID NO: 854 - RNA, 20 nt, synthetic construct
  source 1..20: mol_type = other RNA
gtatttctcaatgccccaca

SEQ ID NO: 855 - RNA, 20 nt, synthetic construct
  source 1..20: mol_type = other RNA
tttatagtatttctcaatgc

SEQ ID NO: 856 - RNA, 20 nt, synthetic construct
  source 1..20: mol_type = other RNA
tcaacaaaacaatttatagt

SEQ ID NO: 857 - RNA, 20 nt, synthetic construct
  source 1..20: mol_type = other RNA
tcagttcaacaaaacaattt

SEQ ID NO: 858 - RNA, 20 nt, synthetic construct
  source 1..20: mol_type = other RNA
cactatcagttcaacaaaac

SEQ ID NO: 859 - RNA, 20 nt, synthetic construct
  source 1..20: mol_type = other RNA
catagtcactatcagttcaa

SEQ ID NO: 860 - RNA, 20 nt, synthetic construct
  source 1..20: mol_type = other RNA
cattcttcatagtcactatc

SEQ ID NO: 861 - RNA, 20 nt, synthetic construct
  source 1..20: mol_type = other RNA
aattggcattcttcatagtc

SEQ ID NO: 862 - RNA, 20 nt, synthetic construct
  source 1..20: mol_type = other RNA
ggcagaaattggcattcttc

SEQ ID NO: 863 - RNA, 20 nt, synthetic construct
  source 1..20: mol_type = other RNA
ttctaggcagaaattggcat

SEQ ID NO: 864 - RNA, 20 nt, synthetic construct
  source 1..20: mol_type = other RNA
ggaggcatttctaggcagaa

SEQ ID NO: 865 - RNA, 20 nt, synthetic construct
  source 1..20: mol_type = other RNA
aggatggaggcatttctagg

SEQ ID NO: 866 - RNA, 20 nt, synthetic construct
  source 1..20: mol_type = other RNA
ttttctcaggatggaggcat

SEQ ID NO: 867 - RNA, 20 nt, synthetic construct
  source 1..20: mol_type = other RNA
ccaaattttctcaggatgga

SEQ ID NO: 868 - RNA, 20 nt, synthetic construct
  source 1..20: mol_type = other RNA
ttactccaaattttctcagg

SEQ ID NO: 869 - RNA, 20 nt, synthetic construct
  source 1..20: mol_type = other RNA
ggtgtttactccaaattttc

SEQ ID NO: 870 - RNA, 20 nt, synthetic construct
  source 1..20: mol_type = other RNA
aaagtataggtgtttactcc

SEQ ID NO: 871 - RNA, 20 nt, synthetic construct
  source 1..20: mol_type = other RNA
gaaattttaaagtataggtg

SEQ ID NO: 872 - RNA, 20 nt, synthetic construct
  source 1..20: mol_type = other RNA
cttatgacaaatctttagaa

SEQ ID NO: 873 - RNA, 20 nt, synthetic construct
  source 1..20: mol_type = other RNA
atttattcttatgacaaatc

SEQ ID NO: 874 - RNA, 20 nt, synthetic construct
  source 1..20: mol_type = other RNA
tatatatttattcttatgac

SEQ ID NO: 875 - RNA, 20 nt, synthetic construct
  source 1..20: mol_type = other RNA
cacaacaatcacatatatat

SEQ ID NO: 876 - RNA, 20 nt, synthetic construct
  source 1..20: mol_type = other RNA
gtcatcacaacaatcacata

SEQ ID NO: 877 - RNA, 20 nt, synthetic construct
  source 1..20: mol_type = other RNA
ggaaagtcatcacaacaatc

SEQ ID NO: 878 - RNA, 20 nt, synthetic construct
  source 1..20: mol_type = other RNA
tttgtaaggaaagtcatcac

SEQ ID NO: 879 - RNA, 20 nt, synthetic construct
  source 1..20: mol_type = other RNA
tcatatttgtaaggaaagtc

SEQ ID NO: 880 - RNA, 20 nt, synthetic construct
  source 1..20: mol_type = other RNA
ggttatcatatttgtaagga

SEQ ID NO: 881 - RNA, 20 nt, synthetic construct
  source 1..20: mol_type = other RNA
cccatggttatcatatttgt

SEQ ID NO: 882 - RNA, 20 nt, synthetic construct
  source 1..20: mol_type = other RNA
ctaagcccatggttatcata

SEQ ID NO: 883 - RNA, 20 nt, synthetic construct
  source 1..20: mol_type = other RNA
tatcactaagcccatggtta

SEQ ID NO: 884 - RNA, 20 nt, synthetic construct
  source 1..20: mol_type = other RNA
ggaaaattatcactaagccc

SEQ ID NO: 885 - RNA, 20 nt, synthetic construct
  source 1..20: mol_type = other RNA
aatgtcttggaaaattatca

SEQ ID NO: 886 - RNA, 20 nt, synthetic construct
  source 1..20: mol_type = other RNA
gatcagaaaaatgtcttgga

SEQ ID NO: 887 - RNA, 20 nt, synthetic construct
  source 1..20: mol_type = other RNA
caatagatcagaaaaatgtc

SEQ ID NO: 888 - RNA, 20 nt, synthetic construct
  source 1..20: mol_type = other RNA
aatcctatccaatagatcag

SEQ ID NO: 889 - RNA, 20 nt, synthetic construct
  source 1..20: mol_type = other RNA
atacaaatcctatccaatag

SEQ ID NO: 890 - RNA, 20 nt, synthetic construct
  source 1..20: mol_type = other RNA
aaagcatacaaatcctatcc

SEQ ID NO: 891 - RNA, 20 nt, synthetic construct
  source 1..20: mol_type = other RNA
ctcataaagcatacaaatcc

SEQ ID NO: 892 - RNA, 20 nt, synthetic construct
  source 1..20: mol_type = other RNA
atattgctcataaagcatac

SEQ ID NO: 893 - RNA, 20 nt, synthetic construct
  source 1..20: mol_type = other RNA
gaaatatattgctcataaag

SEQ ID NO: 894 - RNA, 20 nt, synthetic construct
  source 1..20: mol_type = other RNA
ctattagaaatatattgctc

SEQ ID NO: 895 - RNA, 20 nt, synthetic construct
  source 1..20: mol_type = other RNA
tgaataactattagaaatat

SEQ ID NO: 896 - RNA, 20 nt, synthetic construct
  source 1..20: mol_type = other RNA
catgctgaataactattaga

SEQ ID NO: 897 - RNA, 20 nt, synthetic construct
  source 1..20: mol_type = other RNA
gataacatgctgaataacta

SEQ ID NO: 898 - RNA, 20 nt, synthetic construct
  source 1..20: mol_type = other RNA
gcctatgtgataacatgctg

SEQ ID NO: 899 - RNA, 20 nt, synthetic construct
  source 1..20: mol_type = other RNA
ggctttgcctatgtgataac

SEQ ID NO: 900 - RNA, 20 nt, synthetic construct
  source 1..20: mol_type = other RNA
tcataggctttgcctatgtg

SEQ ID NO: 901 - RNA, 20 nt, synthetic construct
  source 1..20: mol_type = other RNA
ttttcagtcataggctttgc

SEQ ID NO: 902 - RNA, 20 nt, synthetic construct
  source 1..20: mol_type = other RNA
gtgatcactttttcagtcat

SEQ ID NO: 903 - RNA, 20 nt, synthetic construct
  source 1..20: mol_type = other RNA
acttcagtgatcactttttc

SEQ ID NO: 904 - RNA, 20 nt, synthetic construct
  source 1..20: mol_type = other RNA
gtttttaacttcagtgatca

SEQ ID NO: 905 - RNA, 20 nt, synthetic construct
  source 1..20: mol_type = other RNA
ggcaggtttttaacttcagt

SEQ ID NO: 906 - RNA, 20 nt, synthetic construct
  source 1..20: mol_type = other RNA
gtcatattggcaggttttta

SEQ ID NO: 907 - RNA, 20 nt, synthetic construct
  source 1..20: mol_type = other RNA
ctttagtcatattggcaggt

SEQ ID NO: 908 - RNA, 20 nt, synthetic construct
  source 1..20: mol_type = other RNA
taaatctttagtcatattgg

SEQ ID NO: 909 - RNA, 20 nt, synthetic construct
  source 1..20: mol_type = other RNA
ggggagtgttaaatctttag

SEQ ID NO: 910 - RNA, 20 nt, synthetic construct
  source 1..20: mol_type = other RNA
gatcatgaggggagtgttaa

SEQ ID NO: 911 - RNA, 20 nt, synthetic construct
  source 1..20: mol_type = other RNA
attgtttagatcatgagggg

SEQ ID NO: 912 - RNA, 20 nt, synthetic construct
  source 1..20: mol_type = other RNA
tataaattgtttagatcatg

SEQ ID NO: 913 - RNA, 20 nt, synthetic construct
  source 1..20: mol_type = other RNA
gcagctataaattgtttaga

SEQ ID NO: 914 - RNA, 20 nt, synthetic construct
  source 1..20: mol_type = other RNA
gggtgtgcagctataaattg

SEQ ID NO: 915 - RNA, 20 nt, synthetic construct
  source 1..20: mol_type = other RNA
gcagtgggtgtgcagctata

SEQ ID NO: 916 - RNA, 20 nt, synthetic construct
  source 1..20: mol_type = other RNA
ttatggcagtgggtgtgcag

SEQ ID NO: 917 - RNA, 20 nt, synthetic construct
  source 1..20: mol_type = other RNA
gttgatttatggcagtgggt

SEQ ID NO: 918 - RNA, 20 nt, synthetic construct
  source 1..20: mol_type = other RNA
actgtgttgatttatggcag

SEQ ID NO: 919 - RNA, 20 nt, synthetic construct
  source 1..20: mol_type = other RNA
tggtaataaaactgtgttga

SEQ ID NO: 920 - RNA, 20 nt, synthetic construct
  source 1..20: mol_type = other RNA
tcaattggtaataaaactgt

SEQ ID NO: 921 - RNA, 20 nt, synthetic construct
  source 1..20: mol_type = other RNA
cttctttcaattggtaataa

SEQ ID NO: 922 - RNA, 20 nt, synthetic construct
  source 1..20: mol_type = other RNA
gagttggcttctttcaattg

SEQ ID NO: 923 - RNA, 20 nt, synthetic construct
  source 1..20: mol_type = other RNA
ggcgttagagttggcttctt

SEQ ID NO: 924 - RNA, 20 nt, synthetic construct
  source 1..20: mol_type = other RNA
gtgatggcgttagagttggc

SEQ ID NO: 925 - RNA, 20 nt, synthetic construct
  source 1..20: mol_type = other RNA
gaaaggtgatggcgttagag

SEQ ID NO: 926 - RNA, 20 nt, synthetic construct
  source 1..20: mol_type = other RNA
gagaagaaaggtgatggcgt

SEQ ID NO: 927 - RNA, 20 nt, synthetic construct
  source 1..20: mol_type = other RNA
acaagatgagaagaaaggtg

SEQ ID NO: 928 - RNA, 20 nt, synthetic construct
  source 1..20: mol_type = other RNA
catcaggttacaagatgaga

SEQ ID NO: 929 - RNA, 20 nt, synthetic construct
  source 1..20: mol_type = other RNA
gtttttctcatcaggttaca

SEQ ID NO: 930 - RNA, 20 nt, synthetic construct
  source 1..20: mol_type = other RNA
cttatgtttttctcatcagg

SEQ ID NO: 931 - RNA, 20 nt, synthetic construct
  source 1..20: mol_type = other RNA
aaatccttatgtttttctca

SEQ ID NO: 932 - RNA, 20 nt, synthetic construct
  source 1..20: mol_type = other RNA
gtggtctttaaatccttatg

SEQ ID NO: 933 - RNA, 20 nt, synthetic construct
  source 1..20: mol_type = other RNA
gaaagggtggtctttaaatc

SEQ ID NO: 934 - RNA, 20 nt, synthetic construct
  source 1..20: mol_type = other RNA
ttgtattggaaagggtggtc

SEQ ID NO: 935 - RNA, 20 nt, synthetic construct
  source 1..20: mol_type = other RNA
tcccattgtattggaaaggg

SEQ ID NO: 936 - RNA, 20 nt, synthetic construct
  source 1..20: mol_type = other RNA
gaatttcccattgtattgga

SEQ ID NO: 937 - RNA, 20 nt, synthetic construct
  source 1..20: mol_type = other RNA
ctagggagaatttcccattg

SEQ ID NO: 938 - RNA, 20 nt, synthetic construct
  source 1..20: mol_type = other RNA
atcaccacctagggagaatt

SEQ ID NO: 939 - RNA, 20 nt, synthetic construct
  source 1..20: mol_type = other RNA
tcataaaatcaccacctagg

SEQ ID NO: 940 - RNA, 20 nt, synthetic construct
  source 1..20: mol_type = other RNA
gaataactcataaaatcacc

SEQ ID NO: 941 - RNA, 20 nt, synthetic construct
  source 1..20: mol_type = other RNA
ggggattttctttcttacta

SEQ ID NO: 942 - RNA, 20 nt, synthetic construct
  source 1..20: mol_type = other RNA
gccagtggggattttctttc

SEQ ID NO: 943 - RNA, 20 nt, synthetic construct
  source 1..20: mol_type = other RNA
ttttccagccagtggggatt

SEQ ID NO: 944 - RNA, 20 nt, synthetic construct
  source 1..20: mol_type = other RNA
cagaattttccagccagtgg

SEQ ID NO: 945 - RNA, 20 nt, synthetic construct
  source 1..20: mol_type = other RNA
ttggccagaattttccagcc

SEQ ID NO: 946 - RNA, 20 nt, synthetic construct
  source 1..20: mol_type = other RNA
atactaggtttggccagaat

SEQ ID NO: 947 - RNA, 20 nt, synthetic construct
  source 1..20: mol_type = other RNA
ttaagatactaggtttggcc

SEQ ID NO: 948 - RNA, 20 nt, synthetic construct
  source 1..20: mol_type = other RNA
gcttgtgtttaagatactag

SEQ ID NO: 949 - RNA, 20 nt, synthetic construct
  source 1..20: mol_type = other RNA
gaataaagcttgtgtttaag

SEQ ID NO: 950 - RNA, 20 nt, synthetic construct
  source 1..20: mol_type = other RNA
ctagaagaataaagcttgtg

SEQ ID NO: 951 - RNA, 20 nt, synthetic construct
  source 1..20: mol_type = other RNA
gaaatctagaagaataaagc

SEQ ID NO: 952 - RNA, 20 nt, synthetic construct
  source 1..20: mol_type = other RNA
gaagagggaaatctagaaga

SEQ ID NO: 953 - RNA, 20 nt, synthetic construct
  source 1..20: mol_type = other RNA
tctctagaagagggaaatct

SEQ ID NO: 954 - RNA, 20 nt, synthetic construct
  source 1..20: mol_type = other RNA
ctgaaatctctagaagaggg

SEQ ID NO: 955 - RNA, 20 nt, synthetic construct
  source 1..20: mol_type = other RNA
atcatctccaagagttctat

SEQ ID NO: 956 - RNA, 20 nt, synthetic construct
  source 1..20: mol_type = other RNA
tgagtatcatctccaagagt

SEQ ID NO: 957 - RNA, 20 nt, synthetic construct
  source 1..20: mol_type = other RNA
tacttaacgtcactagggag

SEQ ID NO: 958 - RNA, 20 nt, synthetic construct
  source 1..20: mol_type = other RNA
gctatactgaaatctctaga

SEQ ID NO: 959 - RNA, 20 nt, synthetic construct
  source 1..20: mol_type = other RNA
gattgagctatactgaaatc

SEQ ID NO: 960 - RNA, 20 nt, synthetic construct
  source 1..20: mol_type = other RNA
tagtgaacctgagattgagc

SEQ ID NO: 961 - RNA, 20 nt, synthetic construct
  source 1..20: mol_type = other RNA
atcgctagtgaacctgagat

SEQ ID NO: 962 - RNA, 20 nt, synthetic construct
  source 1..20: mol_type = other RNA
ctgtgaatcgctagtgaacc

SEQ ID NO: 963 - RNA, 20 nt, synthetic construct
  source 1..20: mol_type = other RNA
gtgttcatctctgtgaatcg

SEQ ID NO: 964 - RNA, 20 nt, synthetic construct
  source 1..20: mol_type = other RNA
ctcaggtgttcatctctgtg

SEQ ID NO: 965 - RNA, 20 nt, synthetic construct
  source 1..20: mol_type = other RNA
atacctctcaggtgttcatc

SEQ ID NO: 966 - RNA, 20 nt, synthetic construct
  source 1..20: mol_type = other RNA
tctccatacctctcaggtgt

SEQ ID NO: 967 - RNA, 20 nt, synthetic construct
  source 1..20: mol_type = other RNA
ttactttctctccatacctc

SEQ ID NO: 968 - RNA, 20 nt, synthetic construct
  source 1..20: mol_type = other RNA
ggactttttactttctctcc

SEQ ID NO: 969 - RNA, 20 nt, synthetic construct
  source 1..20: mol_type = other RNA
gagtatagaggactttttac

SEQ ID NO: 970 - RNA, 20 nt, synthetic construct
  source 1..20: mol_type = other RNA
gttggtataactgggagtat

SEQ ID NO: 971 - RNA, 20 nt, synthetic construct
  source 1..20: mol_type = other RNA
tatttgttggtataactggg

SEQ ID NO: 972 - RNA, 20 nt, synthetic construct
  source 1..20: mol_type = other RNA
ggcaaagagttatttgttgg

SEQ ID NO: 973 - RNA, 20 nt, synthetic construct
  source 1..20: mol_type = other RNA
ctgagggcaaagagttattt

SEQ ID NO: 974 - RNA, 20 nt, synthetic construct
  source 1..20: mol_type = other RNA
catgactgagggcaaagagt

SEQ ID NO: 975 - RNA, 20 nt, synthetic construct
  source 1..20: mol_type = other RNA
agggtcatgactgagggcaa

SEQ ID NO: 976 - RNA, 20 nt, synthetic construct
  source 1..20: mol_type = other RNA
gattgagggtcatgactgag

SEQ ID NO: 977 - RNA, 20 nt, synthetic construct
  source 1..20: mol_type = other RNA
aaatagattgagggtcatga

SEQ ID NO: 978 - RNA, 20 nt, synthetic construct
  source 1..20: mol_type = other RNA
gcagtcacaaatagattgag

SEQ ID NO: 979 - RNA, 20 nt, synthetic construct
  source 1..20: mol_type = other RNA
ggaaatgcagtcacaaatag

SEQ ID NO: 980 - RNA, 20 nt, synthetic construct
  source 1..20: mol_type = other RNA
ccatgaggaaatgcagtcac

SEQ ID NO: 981 - RNA, 20 nt, synthetic construct
  source 1..20: mol_type = other RNA
acttacccatgaggaaatgc

SEQ ID NO: 982 - RNA, 20 nt, synthetic construct
  source 1..20: mol_type = other RNA
accacttcaacttacccatg

SEQ ID NO: 983 - RNA, 20 nt, synthetic construct
  source 1..20: mol_type = other RNA
atccaaccacttcaacttac

SEQ ID NO: 984 - RNA, 20 nt, synthetic construct
  source 1..20: mol_type = other RNA
aattagctaatccaaccact

SEQ ID NO: 985 - RNA, 20 nt, synthetic construct
  source 1..20: mol_type = other RNA
gctttaaaattagctaatcc

SEQ ID NO: 986 - RNA, 20 nt, synthetic construct
  source 1..20: mol_type = other RNA
gaggaagctttaaaattagc

SEQ ID NO: 987 - RNA, 20 nt, synthetic construct
  source 1..20: mol_type = other RNA
ttaagcatgaggaagcttta

SEQ ID NO: 988 - RNA, 20 nt, synthetic construct
  source 1..20: mol_type = other RNA
taatatttttaagcatgagg

SEQ ID NO: 989 - RNA, 20 nt, synthetic construct
  source 1..20: mol_type = other RNA
tagttgtaatatttttaagc

SEQ ID NO: 990 - RNA, 20 nt, synthetic construct
  source 1..20: mol_type = other RNA
ttaatgtagttgtaatattt

SEQ ID NO: 991 - RNA, 20 nt, synthetic construct
  source 1..20: mol_type = other RNA
cattatttaatgtagttgta

SEQ ID NO: 992 - RNA, 20 nt, synthetic construct
  source 1..20: mol_type = other RNA
atcaacattatttaatgtag

SEQ ID NO: 993 - RNA, 20 nt, synthetic construct
  source 1..20: mol_type = other RNA
atcattatcaacattattta

SEQ ID NO: 994 - RNA, 20 nt, synthetic construct
  source 1..20: mol_type = other RNA
gaatttttcatcattatcaa

SEQ ID NO: 995 - RNA, 20 nt, synthetic construct
  source 1..20: mol_type = other RNA
gttcttgaatttttcatcat

SEQ ID NO: 996 - RNA, 20 nt, synthetic construct
  source 1..20: mol_type = other RNA
gtgggcatgttcttgaattt

SEQ ID NO: 997 - RNA, 20 nt, synthetic construct
  source 1..20: mol_type = other RNA
aaagtgtgggcatgttcttg

SEQ ID NO: 998 - RNA, 20 nt, synthetic construct
  source 1..20: mol_type = other RNA
tctatgaaaagtgtgggcat

SEQ ID NO: 999 - RNA, 20 nt, synthetic construct
  source 1..20: mol_type = other RNA
atgattctatgaaaagtgtg

SEQ ID NO: 1000 - RNA, 20 nt, synthetic construct
  source 1..20: mol_type = other RNA
taaggaaatatgattctatg

SEQ ID NO: 1001 - RNA, 20 nt, synthetic construct
  source 1..20: mol_type = other RNA
tgaatgggaaatattaagga

SEQ ID NO: 1002 - RNA, 20 nt, synthetic construct
  source 1..20: mol_type = other RNA
tgggaaatgaaatgaatggg

SEQ ID NO: 1003 - RNA, 20 nt, synthetic construct
  source 1..20: mol_type = other RNA
ccttatgggaaatgaaatga

SEQ ID NO: 1004 - RNA, 20 nt, synthetic construct
  source 1..20: mol_type = other RNA
catggccttatgggaaatga

SEQ ID NO: 1005 - RNA, 20 nt, synthetic construct
  source 1..20: mol_type = other RNA
ggttaaacatggccttatgg

SEQ ID NO: 1006 - RNA, 20 nt, synthetic construct
  source 1..20: mol_type = other RNA
atacaggttaaacatggcct

SEQ ID NO: 1007 - RNA, 20 nt, synthetic construct
  source 1..20: mol_type = other RNA
ggtcaaatacaggttaaaca

SEQ ID NO: 1008 - RNA, 20 nt, synthetic construct
  source 1..20: mol_type = other RNA
tgaagaggtcaaatacaggt

SEQ ID NO: 1009 - RNA, 20 nt, synthetic construct
  source 1..20: mol_type = other RNA
cccgaagttgaagaggtcaa

SEQ ID NO: 1010 - RNA, 20 nt, synthetic construct
  source 1..20: mol_type = other RNA
agatccccgaagttgaagag

SEQ ID NO: 1011 - RNA, 20 nt, synthetic construct
  source 1..20: mol_type = other RNA
ggttaagtcaagatccccga

SEQ ID NO: 1012 - RNA, 20 nt, synthetic construct
  source 1..20: mol_type = other RNA
tgcgtgactcaggttaagtc

SEQ ID NO: 1013 - RNA, 20 nt, synthetic construct
  source 1..20: mol_type = other RNA
gtattcatggactgcgtgac

SEQ ID NO: 1014 - RNA, 20 nt, synthetic construct
  source 1..20: mol_type = other RNA
agggtgtattcatggactgc

SEQ ID NO: 1015 - RNA, 20 nt, synthetic construct
  source 1..20: mol_type = other RNA
ggtccagggtgtattcatgg

SEQ ID NO: 1016 - RNA, 20 nt, synthetic construct
  source 1..20: mol_type = other RNA
ttcctggtgacagcaaggtc

SEQ ID NO: 1017 - RNA, 20 nt, synthetic construct
  source 1..20: mol_type = other RNA
cagtagttcctggtgacagc

SEQ ID NO: 1018 - RNA, 20 nt, synthetic construct
  source 1..20: mol_type = other RNA
tcagacagtagttcctggtg

SEQ ID NO: 1019 - RNA, 20 nt, synthetic construct
  source 1..20: mol_type = other RNA
gttaaacatgtcagacagta

SEQ ID NO: 1020 - RNA, 20 nt, synthetic construct
  source 1..20: mol_type = other RNA
aaggagttaaacatgtcaga

SEQ ID NO: 1021 - RNA, 20 nt, synthetic construct
  source 1..20: mol_type = other RNA
gtgccaaggagttaaacatg

SEQ ID NO: 1022 - RNA, 20 nt, synthetic construct
  source 1..20: mol_type = other RNA
cagtcacagagtgccaagga

SEQ ID NO: 1023 - RNA, 20 nt, synthetic construct
  source 1..20: mol_type = other RNA
atgggcagtcacagagtgcc

SEQ ID NO: 1024 - RNA, 20 nt, synthetic construct
  source 1..20: mol_type = other RNA
ggtacatgggcagtcacaga

SEQ ID NO: 1025 - RNA, 20 nt, synthetic construct
  source 1..20: mol_type = other RNA
aaatgaggtacatgggcagt

SEQ ID NO: 1026 - RNA, 20 nt, synthetic construct
  source 1..20: mol_type = other RNA
gaagcgagaaaatgaggtac

SEQ ID NO: 1027 - RNA, 20 nt, synthetic construct
  source 1..20: mol_type = other RNA
gtggaaggaggaaggaagcg

SEQ ID NO: 1028 - RNA, 20 nt, synthetic construct
  source 1..20: mol_type = other RNA
caaataggtgtggaaggagg

SEQ ID NO: 1029 - RNA, 20 nt, synthetic construct
  source 1..20: mol_type = other RNA
caagtgaggttgacaaatag

SEQ ID NO: 1030 - RNA, 20 nt, synthetic construct
  source 1..20: mol_type = other RNA
atggctcaagtgaggttgac

SEQ ID NO: 1031 - RNA, 20 nt, synthetic construct
  source 1..20: mol_type = other RNA
aggactgcatggctcaagtg

SEQ ID NO: 1032 - RNA, 20 nt, synthetic construct
  source 1..20: mol_type = other RNA
tgaaggatttaaaggactgc

SEQ ID NO: 1033 - RNA, 20 nt, synthetic construct
  source 1..20: mol_type = other RNA
ggaaggaaatgaaggattta

SEQ ID NO: 1034 - RNA, 20 nt, synthetic construct
  source 1..20: mol_type = other RNA
agcaatggaaggaaatgaag

SEQ ID NO: 1035 - RNA, 20 nt, synthetic construct
  source 1..20: mol_type = other RNA
gggtttagcaatggaaggaa

SEQ ID NO: 1036 - RNA, 20 nt, synthetic construct
  source 1..20: mol_type = other RNA
ttaatggggtttagcaatgg

SEQ ID NO: 1037 - RNA, 20 nt, synthetic construct
  source 1..20: mol_type = other RNA
aaatcttaatggggtttagc

SEQ ID NO: 1038 - RNA, 20 nt, synthetic construct
  source 1..20: mol_type = other RNA
gaagcaaaatcttaatgggg

SEQ ID NO: 1039 - RNA, 20 nt, synthetic construct
  source 1..20: mol_type = other RNA
gcatggggaaggaagcaaaa

SEQ ID NO: 1040 - RNA, 20 nt, synthetic construct
  source 1..20: mol_type = other RNA
ttggctgcatggggaaggaa

SEQ ID NO: 1041 - RNA, 20 nt, synthetic construct
  source 1..20: mol_type = other RNA
ggaccttggctgcatgggga

SEQ ID NO: 1042 - RNA, 20 nt, synthetic construct
  source 1..20: mol_type = other RNA
cagagggaccttggctgcat

SEQ ID NO: 1043 - RNA, 20 nt, synthetic construct
  source 1..20: mol_type = other RNA
atgcctggcagagggacctt

SEQ ID NO: 1044 - RNA, 20 nt, synthetic construct
  source 1..20: mol_type = other RNA
gttcaaatgcctggcagagg

SEQ ID NO: 1045 - RNA, 20 nt, synthetic construct
  source 1..20: mol_type = other RNA
gtgtggttcaaatgcctggc

SEQ ID NO: 1046 - RNA, 20 nt, synthetic construct
  source 1..20: mol_type = other RNA
aggatgatggtgagagtgtg

SEQ ID NO: 1047 - RNA, 20 nt, synthetic construct
  source 1..20: mol_type = other RNA
ataattgaggatgatggtga

SEQ ID NO: 1048 - RNA, 20 nt, synthetic construct
  source 1..20: mol_type = other RNA
tagagaaaataattgaggat

SEQ ID NO: 1049 - RNA, 20 nt, synthetic construct
  source 1..20: mol_type = other RNA
tgatgtagagaaaataattg

SEQ ID NO: 1050 - RNA, 20 nt, synthetic construct
  source 1..20: mol_type = other RNA
ttacaaggatgatgtagaga

SEQ ID NO: 1051 - RNA, 20 nt, synthetic construct
  source 1..20: mol_type = other RNA
gaagtttacaaggatgatgt

SEQ ID NO: 1052 - RNA, 20 nt, synthetic construct
  source 1..20: mol_type = other RNA
ggatgcaggatgaagtttac

SEQ ID NO: 1053 - RNA, 20 nt, synthetic construct
  source 1..20: mol_type = other RNA
cagctggatggatgcaggat

SEQ ID NO: 1054 - RNA, 20 nt, synthetic construct
  source 1..20: mol_type = other RNA
ggcaaacagctggatggatg

SEQ ID NO: 1055 - RNA, 20 nt, synthetic construct
  source 1..20: mol_type = other RNA
aagagggcaaacagctggat

SEQ ID NO: 1056 - RNA, 20 nt, synthetic construct
  source 1..20: mol_type = other RNA
taaggagaagagggcaaaca

SEQ ID NO: 1057 - RNA, 20 nt, synthetic construct
  source 1..20: mol_type = other RNA
tggcttaaggagaagagggc

SEQ ID NO: 1058 - RNA, 20 nt, synthetic construct
  source 1..20: mol_type = other RNA
agcagcctggcttaaggaga

SEQ ID NO: 1059 - RNA, 20 nt, synthetic construct
  source 1..20: mol_type = other RNA
ttgtgtccagcaggcccagc

SEQ ID NO: 1060 - RNA, 20 nt, synthetic construct
  source 1..20: mol_type = other RNA
gtgaggttgtgtccagcagg

SEQ ID NO: 1061 - RNA, 20 nt, synthetic construct
  source 1..20: mol_type = other RNA
caaggtggtgaggttgtgtc

SEQ ID NO: 1062 - RNA, 20 nt, synthetic construct
  source 1..20: mol_type = other RNA
attcacaaggtggtgaggtt

SEQ ID NO: 1063 - RNA, 20 nt, synthetic construct
  source 1..20: mol_type = other RNA
cctgtgttggtatccattca

SEQ ID NO: 1064 - RNA, 20 nt, synthetic construct
  source 1..20: mol_type = other RNA
tagactctgcctgtgttggt

SEQ ID NO: 1065 - RNA, 20 nt, synthetic construct
  source 1..20: mol_type = other RNA
gctgagtactagactctgcc

SEQ ID NO: 1066 - RNA, 20 nt, synthetic construct
  source 1..20: mol_type = other RNA
gggcagctgagtactagact

SEQ ID NO: 1067 - RNA, 20 nt, synthetic construct
  source 1..20: mol_type = other RNA
agcttagggcagctgagtac

SEQ ID NO: 1068 - RNA, 20 nt, synthetic construct
  source 1..20: mol_type = other RNA
gaagggaagcttagggcagc

SEQ ID NO: 1069 - RNA, 20 nt, synthetic construct
  source 1..20: mol_type = other RNA
gggccagaagggaagcttag

SEQ ID NO: 1070 - RNA, 20 nt, synthetic construct
  source 1..20: mol_type = other RNA
ttcttttctgggccagaagg

SEQ ID NO: 1071 - RNA, 20 nt, synthetic construct
  source 1..20: mol_type = other RNA
taggattcttttctgggcca

SEQ ID NO: 1072 - RNA, 20 nt, synthetic construct
  source 1..20: mol_type = other RNA
aaatttaggattcttttctg

SEQ ID NO: 1073 - RNA, 20 nt, synthetic construct
  source 1..20: mol_type = other RNA
tcagaaaaaatttaggattc

SEQ ID NO: 1074 - RNA, 20 nt, synthetic construct
  source 1..20: mol_type = other RNA
ggggagtctcagaaaaaatt

SEQ ID NO: 1075 - RNA, 20 nt, synthetic construct
  source 1..20: mol_type = other RNA
gaccgtggggagtctcagaa

SEQ ID NO: 1076 - RNA, 20 nt, synthetic construct
  source 1..20: mol_type = other RNA
ggccagaccgtggggagtct

SEQ ID NO: 1077 - RNA, 20 nt, synthetic construct
  source 1..20: mol_type = other RNA
gccaagggccagaccgtggg

SEQ ID NO: 1078 - RNA, 20 nt, synthetic construct
  source 1..20: mol_type = other RNA
aggtcagagagccaagggcc

SEQ ID NO: 1079 - RNA, 20 nt, synthetic construct
  source 1..20: mol_type = other RNA
agttggaggaggtgaggtca

SEQ ID NO: 1080 - RNA, 20 nt, synthetic construct
  source 1..20: mol_type = other RNA
gaatatagttggaggaggtg

SEQ ID NO: 1081 - RNA, 20 nt, synthetic construct
  source 1..20: mol_type = other RNA
gagaactagaatatagttgg

SEQ ID NO: 1082 - RNA, 20 nt, synthetic construct
  source 1..20: mol_type = other RNA
gtggggtgttgagaactaga

SEQ ID NO: 1083 - RNA, 20 nt, synthetic construct
  source 1..20: mol_type = other RNA
ggcaagtggggtgttgagaa

SEQ ID NO: 1084 - RNA, 20 nt, synthetic construct
  source 1..20: mol_type = other RNA
ggccaggcaagtggggtgtt

SEQ ID NO: 1085 - RNA, 20 nt, synthetic construct
  source 1..20: mol_type = other RNA
caagaggccaggcaagtggg

SEQ ID NO: 1086 - RNA, 20 nt, synthetic construct
  source 1..20: mol_type = other RNA
gtcagcaagaggccaggcaa

SEQ ID NO: 1087 - RNA, 20 nt, synthetic construct
  source 1..20: mol_type = other RNA
gacaaaggtcagcaagaggc

SEQ ID NO: 1088 - RNA, 20 nt, synthetic construct
  source 1..20: mol_type = other RNA
gcatggacaaaggtcagcaa

SEQ ID NO: 1089 - RNA, 20 nt, synthetic construct
  source 1..20: mol_type = other RNA
gttgggcatggacaaaggtc

SEQ ID NO: 1090 - RNA, 20 nt, synthetic construct
  source 1..20: mol_type = other RNA
gaacagttgggcatggacaa

SEQ ID NO: 1091 - RNA, 20 nt, synthetic construct
  source 1..20: mol_type = other RNA
aggtgggaacagttgggcat

SEQ ID NO: 1092 - RNA, 20 nt, synthetic construct
  source 1..20: mol_type = other RNA
ccgcacccagaggtgggaac

SEQ ID NO: 1093 - RNA, 20 nt, synthetic construct
  source 1..20: mol_type = other RNA
ggtgcccgcacccagaggtg

SEQ ID NO: 1094 - RNA, 20 nt, synthetic construct
  source 1..20: mol_type = other RNA
tagcaggtgcccgcacccag

SEQ ID NO: 1095 - RNA, 20 nt, synthetic construct
  source 1..20: mol_type = other RNA
aaggagtagcaggtgcccgc

SEQ ID NO: 1096 - RNA, 20 nt, synthetic construct
  source 1..20: mol_type = other RNA
ggggagaaggagtagcaggt

SEQ ID NO: 1097 - RNA, 20 nt, synthetic construct
  source 1..20: mol_type = other RNA
cacctggggagaaggagtag

SEQ ID NO: 1098 - RNA, 20 nt, synthetic construct
  source 1..20: mol_type = other RNA
aaatgcacctggggagaagg

SEQ ID NO: 1099 - RNA, 20 nt, synthetic construct
  source 1..20: mol_type = other RNA
cctaaagaaaatgcacctgg

SEQ ID NO: 1100 - RNA, 20 nt, synthetic construct
  source 1..20: mol_type = other RNA
tgtggttacctaaagaaaat

SEQ ID NO: 1101 - RNA, 20 nt, synthetic construct
  source 1..20: mol_type = other RNA
tggagctgtccctgtggtta

SEQ ID NO: 1102 - RNA, 20 nt, synthetic construct
  source 1..20: mol_type = other RNA
ggtgatggagctgtccctgt

SEQ ID NO: 1103 - RNA, 20 nt, synthetic construct
  source 1..20: mol_type = other RNA
gcggaggtgatggagctgtc

SEQ ID NO: 1104 - RNA, 20 nt, synthetic construct
  source 1..20: mol_type = other RNA
aggtctagcggaggtgatgg

SEQ ID NO: 1105 - RNA, 20 nt, synthetic construct
  source 1..20: mol_type = other RNA
ttcaaaggaaggtctagcgg

SEQ ID NO: 1106 - RNA, 20 nt, synthetic construct
  source 1..20: mol_type = other RNA
ggtgatttcaaaggaaggtc

SEQ ID NO: 1107 - RNA, 20 nt, synthetic construct
  source 1..20: mol_type = other RNA
tgagtaggtgatttcaaagg

SEQ ID NO: 1108 - RNA, 20 nt, synthetic construct
  source 1..20: mol_type = other RNA
tctgttgagtaggtgatttc

SEQ ID NO: 1109 - RNA, 20 nt, synthetic construct
  source 1..20: mol_type = other RNA
ggcaagactctgttgagtag

SEQ ID NO: 1110 - RNA, 20 nt, synthetic construct
  source 1..20: mol_type = other RNA
tttggccaggcaagactctg

SEQ ID NO: 1111 - RNA, 20 nt, synthetic construct
  source 1..20: mol_type = other RNA
aattttaaagactttggcca

SEQ ID NO: 1112 - RNA, 20 nt, synthetic construct
  source 1..20: mol_type = other RNA
ggggttgaaattttaaagac

SEQ ID NO: 1113 - RNA, 20 nt, synthetic construct
  source 1..20: mol_type = other RNA
cgtggggggtggggttgaaa

SEQ ID NO: 1114 - RNA, 20 nt, synthetic construct
  source 1..20: mol_type = other RNA
aatggtgcgtggggggtggg

SEQ ID NO: 1115 - RNA, 20 nt, synthetic construct
  source 1..20: mol_type = other RNA
tatgaaatggtgcgtggggg

SEQ ID NO: 1116 - RNA, 20 nt, synthetic construct
  source 1..20: mol_type = other RNA
ggagctatgaaatggtgcgt

SEQ ID NO: 1117 - RNA, 20 nt, synthetic construct
  source 1..20: mol_type = other RNA
gaaatggagctatgaaatgg

SEQ ID NO: 1118 - RNA, 20 nt, synthetic construct
  source 1..20: mol_type = other RNA
aaactggaaatggagctatg

SEQ ID NO: 1119 - RNA, 20 nt, synthetic construct
  source 1..20: mol_type = other RNA
atcactttctttctgagaag

SEQ ID NO: 1120 - RNA, 20 nt, synthetic construct
  source 1..20: mol_type = other RNA
aatctatcactttctttctg

SEQ ID NO: 1121 - RNA, 20 nt, synthetic construct
  source 1..20: mol_type = other RNA
agtgataatctatcactttc

SEQ ID NO: 1122 - RNA, 20 nt, synthetic construct
  source 1..20: mol_type = other RNA
gtagctagtgataatctatc

SEQ ID NO: 1123 - RNA, 20 nt, synthetic construct
  source 1..20: mol_type = other RNA
gtatagcatggtagctagtg

SEQ ID NO: 1124 - RNA, 20 nt, synthetic construct
  source 1..20: mol_type = other RNA
caaatgtatagcatggtagc

SEQ ID NO: 1125 - RNA, 20 nt, synthetic construct
  source 1..20: mol_type = other RNA
taaatcaaatgtatagcatg

SEQ ID NO: 1126 - RNA, 20 nt, synthetic construct
  source 1..20: mol_type = other RNA
cattgtaaataaatcaaatg

SEQ ID NO: 1127 - RNA, 20 nt, synthetic construct
  source 1..20: mol_type = other RNA
ataaacattgtaaataaatc

SEQ ID NO: 1128 - RNA, 20 nt, synthetic construct
  source 1..20: mol_type = other RNA
gggagatataataaacattg

SEQ ID NO: 1129 - RNA, 20 nt, synthetic construct
  source 1..20: mol_type = other RNA
tttagtgagggagatataat

SEQ ID NO: 1130 - RNA, 20 nt, synthetic construct
  source 1..20: mol_type = other RNA
gtttacattttagtgaggga

SEQ ID NO: 1131 - RNA, 20 nt, synthetic construct
  source 1..20: mol_type = other RNA
gttggcccttgaggagttta

SEQ ID NO: 1132 - RNA, 20 nt, synthetic construct
  source 1..20: mol_type = other RNA
ataggcaaaaatgttggccc

SEQ ID NO: 1133 - RNA, 20 nt, synthetic construct
  source 1..20: mol_type = other RNA
gcgggtatagaaaagaacaa

SEQ ID NO: 1134 - RNA, 20 nt, synthetic construct
  source 1..20: mol_type = other RNA
gtgctgcgggtatagaaaag

SEQ ID NO: 1135 - RNA, 20 nt, synthetic construct
  source 1..20: mol_type = other RNA
tggtatcagacactattgta

SEQ ID NO: 1136 - RNA, 20 nt, synthetic construct
  source 1..20: mol_type = other RNA
ctatttggtatcagacacta

SEQ ID NO: 1137 - RNA, 20 nt, synthetic construct
  source 1..20: mol_type = other RNA
ttgagtgtctatttggtatc

SEQ ID NO: 1138 - RNA, 20 nt, synthetic construct
  source 1..20: mol_type = other RNA
tgcaaatattgagtgtctat

SEQ ID NO: 1139 - RNA, 20 nt, synthetic construct
  source 1..20: mol_type = other RNA
cgttttgcaaatattgagtg

SEQ ID NO: 1140 - RNA, 20 nt, synthetic construct
  source 1..20: mol_type = other RNA
ttaattcattcgttttgcaa

SEQ ID NO: 1141 - RNA, 20 nt, synthetic construct
  source 1..20: mol_type = other RNA
tcactccattaattcattcg

SEQ ID NO: 1142 - RNA, 20 nt, synthetic construct
  source 1..20: mol_type = other RNA
cacattcactccattaattc

SEQ ID NO: 1143 - RNA, 20 nt, synthetic construct
  source 1..20: mol_type = other RNA
ctggagagcacacattcact

SEQ ID NO: 1144 - RNA, 20 nt, synthetic construct
  source 1..20: mol_type = other RNA
ttgagctggagagcacacat

SEQ ID NO: 1145 - RNA, 20 nt, synthetic construct
  source 1..20: mol_type = other RNA
ttgcatgttgagctggagag

SEQ ID NO: 1146 - RNA, 20 nt, synthetic construct
  source 1..20: mol_type = other RNA
agtgtgcattgcatgttgag

SEQ ID NO: 1147 - RNA, 20 nt, synthetic construct
  source 1..20: mol_type = other RNA
agaaatgaagtgtgcattgc

SEQ ID NO: 1148 - RNA, 20 nt, synthetic construct
  source 1..20: mol_type = other RNA
tccgcagagaaatgaagtgt

SEQ ID NO: 1149 - RNA, 20 nt, synthetic construct
  source 1..20: mol_type = other RNA
gagcaatccgcagagaaatg

SEQ ID NO: 1150 - RNA, 20 nt, synthetic construct
  source 1..20: mol_type = other RNA
aatgggagcaatccgcagag

SEQ ID NO: 1151 - RNA, 20 nt, synthetic construct
  source 1..20: mol_type = other RNA
ctgctgagaagaatgggagc

SEQ ID NO: 1152 - RNA, 20 nt, synthetic construct
  source 1..20: mol_type = other RNA
cagagctgctgagaagaatg

SEQ ID NO: 1153 - RNA, 20 nt, synthetic construct
  source 1..20: mol_type = other RNA
ttttgccagagctgctgaga

SEQ ID NO: 1154 - RNA, 20 nt, synthetic construct
  source 1..20: mol_type = other RNA
gcaaattttgccagagctgc

SEQ ID NO: 1155 - RNA, 20 nt, synthetic construct
  source 1..20: mol_type = other RNA
gatcacagcaaattttgcca

SEQ ID NO: 1156 - RNA, 20 nt, synthetic construct
  source 1..20: mol_type = other RNA
gagaagatcacagcaaattt

SEQ ID NO: 1157 - RNA, 20 nt, synthetic construct
  source 1..20: mol_type = other RNA
catggaatgagaagatcaca

SEQ ID NO: 1158 - RNA, 20 nt, synthetic construct
  source 1..20: mol_type = other RNA
ggtgagcatggaatgagaag

SEQ ID NO: 1159 - RNA, 20 nt, synthetic construct
  source 1..20: mol_type = other RNA
tttagaggaggtgagcatgg

SEQ ID NO: 1160 - RNA, 20 nt, synthetic construct
  source 1..20: mol_type = other RNA
gctttgtttttagaggaggt

SEQ ID NO: 1161 - RNA, 20 nt, synthetic construct
  source 1..20: mol_type = other RNA
atgagttgctttgtttttag

SEQ ID NO: 1162 - RNA, 20 nt, synthetic construct
  source 1..20: mol_type = other RNA
gttgaatgagttgctttgtt

SEQ ID NO: 1163 - RNA, 20 nt, synthetic construct
  source 1..20: mol_type = other RNA
ggatgagtaggaagttgaat

SEQ ID NO: 1164 - RNA, 20 nt, synthetic construct
  source 1..20: mol_type = other RNA
ggagaggatgagtaggaagt

SEQ ID NO: 1165 - RNA, 20 nt, synthetic construct
  source 1..20: mol_type = other RNA
tgcgtgggaagtttaaaaaa

SEQ ID NO: 1166 - RNA, 20 nt, synthetic construct
  source 1..20: mol_type = other RNA
cttattgcgtgggaagttta

SEQ ID NO: 1167 - RNA, 20 nt, synthetic construct
  source 1..20: mol_type = other RNA
cgtttcttattgcgtgggaa

SEQ ID NO: 1168 - RNA, 20 nt, synthetic construct
  source 1..20: mol_type = other RNA
ctctgagagccacacgtttc

SEQ ID NO: 1169 - RNA, 20 nt, synthetic construct
  source 1..20: mol_type = other RNA
gcctgggcctctgagagcca

SEQ ID NO: 1170 - RNA, 20 nt, synthetic construct
  source 1..20: mol_type = other RNA
aggtcagcctgggcctctga

SEQ ID NO: 1171 - RNA, 20 nt, synthetic construct
  source 1..20: mol_type = other RNA
gtggtcaggtcagcctgggc

SEQ ID NO: 1172 - RNA, 20 nt, synthetic construct
  source 1..20: mol_type = other RNA
tgggagtggtcaggtcagcc

SEQ ID NO: 1173 - RNA, 20 nt, synthetic construct
  source 1..20: mol_type = other RNA
tttgggctgggagtggtcag

SEQ ID NO: 1174 - RNA, 20 nt, synthetic construct
  source 1..20: mol_type = other RNA
gattagctttgggctgggag

SEQ ID NO: 1175 - RNA, 20 nt, synthetic construct
  source 1..20: mol_type = other RNA
gtggtaagattagctttggg

SEQ ID NO: 1176 - RNA, 20 nt, synthetic construct
  source 1..20: mol_type = other RNA
gaggaagtgggagtggtaag

SEQ ID NO: 1177 - RNA, 20 nt, synthetic construct
  source 1..20: mol_type = other RNA
tcacagcagagggaggaagt

SEQ ID NO: 1178 - RNA, 20 nt, synthetic construct
  source 1..20: mol_type = other RNA
agtaattcacagcagaggga

SEQ ID NO: 1179 - RNA, 20 nt, synthetic construct
  source 1..20: mol_type = other RNA
ttttaagtaattcacagcag

SEQ ID NO: 1180 - RNA, 20 nt, synthetic construct
  source 1..20: mol_type = other RNA
ggtattttagaaattttaag

SEQ ID NO: 1181 - RNA, 20 nt, synthetic construct
  source 1..20: mol_type = other RNA
gggttaaaggtattttagaa

SEQ ID NO: 1182 - RNA, 20 nt, synthetic construct
  source 1..20: mol_type = other RNA
gtggaaacggaagggttaaa

SEQ ID NO: 1183 - RNA, 20 nt, synthetic construct
  source 1..20: mol_type = other RNA
aggtggtggaaacggaaggg

SEQ ID NO: 1184 - RNA, 20 nt, synthetic construct
  source 1..20: mol_type = other RNA
atcaggtaagttcctgaagt

SEQ ID NO: 1185 - RNA, 20 nt, synthetic construct
  source 1..20: mol_type = other RNA
gtctaatttagaagacagaa

SEQ ID NO: 1186 - RNA, 20 nt, synthetic construct
  source 1..20: mol_type = other RNA
tagatgaggtctaatttaga

SEQ ID NO: 1187 - RNA, 18 nt, synthetic construct
  source 1..18: mol_type = other RNA
gacagaagtgaggcatca

SEQ ID NO: 1188 - RNA, 18 nt, synthetic construct
  source 1..18: mol_type = other RNA
gtgaggcatcaggtaagt

SEQ ID NO: 1189 - RNA, 18 nt, synthetic construct
  source 1..18: mol_type = other RNA
gaggcatcaggtaagttc

SEQ ID NO: 1190 - RNA, 18 nt, synthetic construct
  source 1..18: mol_type = other RNA
gcatcaggtaagttcctg

SEQ ID NO: 1191 - RNA, 18 nt, synthetic construct
  source 1..18: mol_type = other RNA
tcctgaagtggaggtggt

SEQ ID NO: 1192 - RNA, 18 nt, synthetic construct
  source 1..18: mol_type = other RNA
cctgaagtggaggtggtg

SEQ ID NO: 1193 - RNA, 19 nt, synthetic construct
  source 1..19: mol_type = other RNA
gtctaatttagaagacaga

SEQ ID NO: 1194 - RNA, 19 nt, synthetic construct
  source 1..19: mol_type = other RNA
gaagacagaagtgaggcat

SEQ ID NO: 1195 - RNA, 19 nt, synthetic construct
  source 1..19: mol_type = other RNA
agacagaagtgaggcatca

SEQ ID NO: 1196 - RNA, 19 nt, synthetic construct
  source 1..19: mol_type = other RNA
gacagaagtgaggcatcag

SEQ ID NO: 1197 - RNA, 19 nt, synthetic construct
  source 1..19: mol_type = other RNA
aagtgaggcatcaggtaag

SEQ ID NO: 1198 - RNA, 19 nt, synthetic construct
  source 1..19: mol_type = other RNA
agtgaggcatcaggtaagt

SEQ ID NO: 1199 - RNA, 19 nt, synthetic construct
  source 1..19: mol_type = other RNA
gtgaggcatcaggtaagtt

SEQ ID NO: 1200 - RNA, 19 nt, synthetic construct
  source 1..19: mol_type = other RNA
tgaggcatcaggtaagttc

SEQ ID NO: 1201 - RNA, 19 nt, synthetic construct
  source 1..19: mol_type = other RNA
gaggcatcaggtaagttcc

SEQ ID NO: 1202 - RNA, 19 nt, synthetic construct
  source 1..19: mol_type = other RNA
ggcatcaggtaagttcctg

SEQ ID NO: 1203 - RNA, 19 nt, synthetic construct
  source 1..19: mol_type = other RNA
gcatcaggtaagttcctga

SEQ ID NO: 1204 - RNA, 19 nt, synthetic construct
  source 1..19: mol_type = other RNA
atcaggtaagttcctgaag

SEQ ID NO: 1205 - RNA, 19 nt, synthetic construct
  source 1..19: mol_type = other RNA
tcaggtaagttcctgaagt

SEQ ID NO: 1206 - RNA, 19 nt, synthetic construct
  source 1..19: mol_type = other RNA
gtaagttcctgaagtggag

SEQ ID NO: 1207 - RNA, 19 nt, synthetic construct
  source 1..19: mol_type = other RNA
aagttcctgaagtggaggt

SEQ ID NO: 1208 - RNA, 19 nt, synthetic construct
  source 1..19: mol_type = other RNA
gttcctgaagtggaggtgg

SEQ ID NO: 1209 - RNA, 19 nt, synthetic construct
  source 1..19: mol_type = other RNA
ttcctgaagtggaggtggt

SEQ ID NO: 1210 - RNA, 19 nt, synthetic construct
  source 1..19: mol_type = other RNA
tcctgaagtggaggtggtg

SEQ ID NO: 1211 - RNA, 19 nt, synthetic construct
  source 1..19: mol_type = other RNA
cctgaagtggaggtggtgg

SEQ ID NO: 1212 - RNA, 20 nt, synthetic construct
  source 1..20: mol_type = other RNA
tgaggtctaatttagaagac

SEQ ID NO: 1213 - RNA, 20 nt, synthetic construct
  source 1..20: mol_type = other RNA
gaggtctaatttagaagaca

SEQ ID NO: 1214 - RNA, 20 nt, synthetic construct
  source 1..20: mol_type = other RNA
aggtctaatttagaagacag

SEQ ID NO: 1215 - RNA, 20 nt, synthetic construct
  source 1..20: mol_type = other RNA
ggtctaatttagaagacaga

SEQ ID NO: 1216 - RNA, 20 nt, synthetic construct
  source 1..20: mol_type = other RNA
agaagacagaagtgaggcat

SEQ ID NO: 1217 - RNA, 20 nt, synthetic construct
  source 1..20: mol_type = other RNA
gaagacagaagtgaggcatc

SEQ ID NO: 1218 - RNA, 20 nt, synthetic construct
  source 1..20: mol_type = other RNA
aagacagaagtgaggcatca

SEQ ID NO: 1219 - RNA, 20 nt, synthetic construct
  source 1..20: mol_type = other RNA
agacagaagtgaggcatcag

SEQ ID NO: 1220 - RNA, 20 nt, synthetic construct
  source 1..20: mol_type = other RNA
gacagaagtgaggcatcagg

SEQ ID NO: 1221 - RNA, 20 nt, synthetic construct
  source 1..20: mol_type = other RNA
acagaagtgaggcatcaggt

SEQ ID NO: 1222 - RNA, 20 nt, synthetic construct
  source 1..20: mol_type = other RNA
gaagtgaggcatcaggtaag

SEQ ID NO: 1223 - RNA, 20 nt, synthetic construct
  source 1..20: mol_type = other RNA
aagtgaggcatcaggtaagt

SEQ ID NO: 1224 - RNA, 20 nt, synthetic construct
  source 1..20: mol_type = other RNA
agtgaggcatcaggtaagtt

SEQ ID NO: 1225 - RNA, 20 nt, synthetic construct
  source 1..20: mol_type = other RNA
gtgaggcatcaggtaagttc

SEQ ID NO: 1226 - RNA, 20 nt, synthetic construct
  source 1..20: mol_type = other RNA
tgaggcatcaggtaagttcc

SEQ ID NO: 1227 - RNA, 20 nt, synthetic construct
  source 1..20: mol_type = other RNA
gaggcatcaggtaagttcct

SEQ ID NO: 1228 - RNA, 20 nt, synthetic construct
  source 1..20: mol_type = other RNA
aggcatcaggtaagttcctg

SEQ ID NO: 1229 - RNA, 20 nt, synthetic construct
  source 1..20: mol_type = other RNA
ggcatcaggtaagttcctga

SEQ ID NO: 1230 - RNA, 20 nt, synthetic construct
  source 1..20: mol_type = other RNA
gcatcaggtaagttcctgaa

SEQ ID NO: 1231 - RNA, 20 nt, synthetic construct
  source 1..20: mol_type = other RNA
catcaggtaagttcctgaag

SEQ ID NO: 1232 - RNA, 20 nt, synthetic construct
  source 1..20: mol_type = other RNA
tcaggtaagttcctgaagtg

SEQ ID NO: 1233 - RNA, 20 nt, synthetic construct
  source 1..20: mol_type = other RNA
caggtaagttcctgaagtgg

SEQ ID NO: 1234 - RNA, 20 nt, synthetic construct
  source 1..20: mol_type = other RNA
ggtaagttcctgaagtggag

SEQ ID NO: 1235 - RNA, 20 nt, synthetic construct
  source 1..20: mol_type = other RNA
gtaagttcctgaagtggagg

SEQ ID NO: 1236 - RNA, 20 nt, synthetic construct
  source 1..20: mol_type = other RNA
taagttcctgaagtggaggt

SEQ ID NO: 1237 - RNA, 20 nt, synthetic construct
  source 1..20: mol_type = other RNA
aagttcctgaagtggaggtg

SEQ ID NO: 1238 - RNA, 20 nt, synthetic construct
  source 1..20: mol_type = other RNA
agttcctgaagtggaggtgg

SEQ ID NO: 1239 - RNA, 20 nt, synthetic construct
  source 1..20: mol_type = other RNA
gttcctgaagtggaggtggt

SEQ ID NO: 1240 - RNA, 20 nt, synthetic construct
  source 1..20: mol_type = other RNA
ttcctgaagtggaggtggtg

SEQ ID NO: 1241 - RNA, 20 nt, synthetic construct
  source 1..20: mol_type = other RNA
tcctgaagtggaggtggtgg

SEQ ID NO: 1242 - RNA, 20 nt, synthetic construct
  source 1..20: mol_type = other RNA
cctgaagtggaggtggtgga

SEQ ID NO: 1243 - RNA, 20 nt, synthetic construct
  source 1..20: mol_type = other RNA
ctgaagtggaggtggtggaa

SEQ ID NO: 1244 - RNA, 21 nt, synthetic construct
  source 1..21: mol_type = other RNA
atgaggtctaatttagaagac

SEQ ID NO: 1245 - RNA, 21 nt, synthetic construct
  source 1..21: mol_type = other RNA
tgaggtctaatttagaagaca

SEQ ID NO: 1246 - RNA, 21 nt, synthetic construct
  source 1..21: mol_type = other RNA
gaggtctaatttagaagacag

SEQ ID NO: 1247 - RNA, 21 nt, synthetic construct
  source 1..21: mol_type = other RNA
aggtctaatttagaagacaga

SEQ ID NO: 1248 - RNA, 21 nt, synthetic construct
  source 1..21: mol_type = other RNA
ggtctaatttagaagacagaa

SEQ ID NO: 1249 - RNA, 21 nt, synthetic construct
  source 1..21: mol_type = other RNA
gtctaatttagaagacagaag

SEQ ID NO: 1250 - RNA, 21 nt, synthetic construct
  source 1..21: mol_type = other RNA
tctaatttagaagacagaagt

SEQ ID NO: 1251 - RNA, 21 nt, synthetic construct
  source 1..21: mol_type = other RNA
ctaatttagaagacagaagtg

SEQ ID NO: 1252 - RNA, 21 nt, synthetic construct
  source 1..21: mol_type = other RNA
taatttagaagacagaagtga

SEQ ID NO: 1253 - RNA, 21 nt, synthetic construct
  source 1..21: mol_type = other RNA
aatttagaagacagaagtgag

SEQ ID NO: 1254 - RNA, 21 nt, synthetic construct
  source 1..21: mol_type = other RNA
tagaagacagaagtgaggcat

SEQ ID NO: 1255 - RNA, 21 nt, synthetic construct
  source 1..21: mol_type = other RNA
agaagacagaagtgaggcatc

SEQ ID NO: 1256 - RNA, 21 nt, synthetic construct
  source 1..21: mol_type = other RNA
gaagacagaagtgaggcatca

SEQ ID NO: 1257 - RNA, 21 nt, synthetic construct
  source 1..21: mol_type = other RNA
aagacagaagtgaggcatcag

SEQ ID NO: 1258 - RNA, 21 nt, synthetic construct
  source 1..21: mol_type = other RNA
agacagaagtgaggcatcagg

SEQ ID NO: 1259 - RNA, 21 nt, synthetic construct
  source 1..21: mol_type = other RNA
gacagaagtgaggcatcaggt

SEQ ID NO: 1260 - RNA, 21 nt, synthetic construct
  source 1..21: mol_type = other RNA
acagaagtgaggcatcaggta

SEQ ID NO: 1261 - RNA, 21 nt, synthetic construct
  source 1..21: mol_type = other RNA
cagaagtgaggcatcaggtaa

SEQ ID NO: 1262 - RNA, 21 nt, synthetic construct
  source 1..21: mol_type = other RNA
agaagtgaggcatcaggtaag

SEQ ID NO: 1263 - RNA, 21 nt, synthetic construct
  source 1..21: mol_type = other RNA
gaagtgaggcatcaggtaagt

SEQ ID NO: 1264 - RNA, 21 nt, synthetic construct
  source 1..21: mol_type = other RNA
aagtgaggcatcaggtaagtt

SEQ ID NO: 1265 - RNA, 21 nt, synthetic construct
  source 1..21: mol_type = other RNA
agtgaggcatcaggtaagttc

SEQ ID NO: 1266 - RNA, 21 nt, synthetic construct
  source 1..21: mol_type = other RNA
gtgaggcatcaggtaagttcc

SEQ ID NO: 1267 - RNA, 21 nt, synthetic construct
  source 1..21: mol_type = other RNA
tgaggcatcaggtaagttcct

SEQ ID NO: 1268 - RNA, 21 nt, synthetic construct
  source 1..21: mol_type = other RNA
gaggcatcaggtaagttcctg

SEQ ID NO: 1269 - RNA, 21 nt, synthetic construct
  source 1..21: mol_type = other RNA
aggcatcaggtaagttcctga

SEQ ID NO: 1270 - RNA, 21 nt, synthetic construct
  source 1..21: mol_type = other RNA
ggcatcaggtaagttcctgaa

SEQ ID NO: 1271 - RNA, 21 nt, synthetic construct
  source 1..21: mol_type = other RNA
gcatcaggtaagttcctgaag

SEQ ID NO: 1272 - RNA, 21 nt, synthetic construct
  source 1..21: mol_type = other RNA
catcaggtaagttcctgaagt

SEQ ID NO: 1273 - RNA, 21 nt, synthetic construct
  source 1..21: mol_type = other RNA
atcaggtaagttcctgaagtg

SEQ ID NO: 1274 - RNA, 21 nt, synthetic construct
  source 1..21: mol_type = other RNA
tcaggtaagttcctgaagtgg

SEQ ID NO: 1275 - RNA, 21 nt, synthetic construct
  source 1..21: mol_type = other RNA
caggtaagttcctgaagtgga

SEQ ID NO: 1276 - RNA, 21 nt, synthetic construct
  source 1..21: mol_type = other RNA
aggtaagttcctgaagtggag

SEQ ID NO: 1277 - RNA, 21 nt, synthetic construct
  source 1..21: mol_type = other RNA
ggtaagttcctgaagtggagg

SEQ ID NO: 1278 - RNA, 21 nt, synthetic construct
  source 1..21: mol_type = other RNA
gtaagttcctgaagtggaggt

SEQ ID NO: 1279 - RNA, 21 nt, synthetic construct
  source 1..21: mol_type = other RNA
taagttcctgaagtggaggtg

SEQ ID NO: 1280 - RNA, 21 nt, synthetic construct
  source 1..21: mol_type = other RNA
aagttcctgaagtggaggtgg

SEQ ID NO: 1281 - RNA, 21 nt, synthetic construct
  source 1..21: mol_type = other RNA
agttcctgaagtggaggtggt

SEQ ID NO: 1282 - RNA, 21 nt, synthetic construct
  source 1..21: mol_type = other RNA
gttcctgaagtggaggtggtg

SEQ ID NO: 1283 - RNA, 21 nt, synthetic construct
  source 1..21: mol_type = other RNA
ttcctgaagtggaggtggtgg

SEQ ID NO: 1284 - RNA, 21 nt, synthetic construct
  source 1..21: mol_type = other RNA
tcctgaagtggaggtggtgga

SEQ ID NO: 1285 - RNA, 21 nt, synthetic construct
  source 1..21: mol_type = other RNA
cctgaagtggaggtggtggaa

SEQ ID NO: 1286 - RNA, 21 nt, synthetic construct
  source 1..21: mol_type = other RNA
ctgaagtggaggtggtggaaa

SEQ ID NO: 1287 - RNA, 22 nt, synthetic construct
  source 1..22: mol_type = other RNA
atgaggtctaatttagaagaca

SEQ ID NO: 1288 - RNA, 22 nt, synthetic construct
  source 1..22: mol_type = other RNA
tgaggtctaatttagaagacag

SEQ ID NO: 1289 - RNA, 22 nt, synthetic construct
  source 1..22: mol_type = other RNA
gaggtctaatttagaagacaga

SEQ ID NO: 1290 - RNA, 22 nt, synthetic construct
  source 1..22: mol_type = other RNA
aggtctaatttagaagacagaa

SEQ ID NO: 1291 - RNA, 22 nt, synthetic construct
  source 1..22: mol_type = other RNA
ggtctaatttagaagacagaag

SEQ ID NO: 1292 - RNA, 22 nt, synthetic construct
  source 1..22: mol_type = other RNA
gtctaatttagaagacagaagt

SEQ ID NO: 1293 - RNA, 22 nt, synthetic construct
  source 1..22: mol_type = other RNA
tctaatttagaagacagaagtg

SEQ ID NO: 1294 - RNA, 22 nt, synthetic construct
  source 1..22: mol_type = other RNA
ctaatttagaagacagaagtga

SEQ ID NO: 1295 - RNA, 22 nt, synthetic construct
  source 1..22: mol_type = other RNA
taatttagaagacagaagtgag

SEQ ID NO: 1296 - RNA, 22 nt, synthetic construct
  source 1..22: mol_type = other RNA
aatttagaagacagaagtgagg

SEQ ID NO: 1297 - RNA, 22 nt, synthetic construct
  source 1..22: mol_type = other RNA
atttagaagacagaagtgaggc

SEQ ID NO: 1298 - RNA, 22 nt, synthetic construct
  source 1..22: mol_type = other RNA
ttagaagacagaagtgaggcat

SEQ ID NO: 1299 - RNA, 22 nt, synthetic construct
  source 1..22: mol_type = other RNA
tagaagacagaagtgaggcatc

SEQ ID NO: 1300 - RNA, 22 nt, synthetic construct
  source 1..22: mol_type = other RNA
agaagacagaagtgaggcatca

SEQ ID NO: 1301 - RNA, 22 nt, synthetic construct
  source 1..22: mol_type = other RNA
gaagacagaagtgaggcatcag

SEQ ID NO: 1302 - RNA, 22 nt, synthetic construct
  source 1..22: mol_type = other RNA
aagacagaagtgaggcatcagg

SEQ ID NO: 1303 - RNA, 22 nt, synthetic construct
  source 1..22: mol_type = other RNA
agacagaagtgaggcatcaggt

SEQ ID NO: 1304 - RNA, 22 nt, synthetic construct
  source 1..22: mol_type = other RNA
gacagaagtgaggcatcaggta

SEQ ID NO: 1305 - RNA, 22 nt, synthetic construct
  source 1..22: mol_type = other RNA
acagaagtgaggcatcaggtaa

SEQ ID NO: 1306 - RNA, 22 nt, synthetic construct
  source 1..22: mol_type = other RNA
cagaagtgaggcatcaggtaag

SEQ ID NO: 1307 - RNA, 22 nt, synthetic construct
  source 1..22: mol_type = other RNA
agaagtgaggcatcaggtaagt

SEQ ID NO: 1308 - RNA, 22 nt, synthetic construct
  source 1..22: mol_type = other RNA
gaagtgaggcatcaggtaagtt

SEQ ID NO: 1309 - RNA, 22 nt, synthetic construct
  source 1..22: mol_type = other RNA
aagtgaggcatcaggtaagttc

SEQ ID NO: 1310 - RNA, 22 nt, synthetic construct
  source 1..22: mol_type = other RNA
agtgaggcatcaggtaagttcc

SEQ ID NO: 1311 - RNA, 22 nt, synthetic construct
  source 1..22: mol_type = other RNA
gtgaggcatcaggtaagttcct

SEQ ID NO: 1312 - RNA, 22 nt, synthetic construct
  source 1..22: mol_type = other RNA
tgaggcatcaggtaagttcctg

SEQ ID NO: 1313 - RNA, 22 nt, synthetic construct
  source 1..22: mol_type = other RNA
gaggcatcaggtaagttcctga

SEQ ID NO: 1314 - RNA, 22 nt, synthetic construct
  source 1..22: mol_type = other RNA
aggcatcaggtaagttcctgaa

SEQ ID NO: 1315 - RNA, 22 nt, synthetic construct
  source 1..22: mol_type = other RNA
ggcatcaggtaagttcctgaag

SEQ ID NO: 1316 - RNA, 22 nt, synthetic construct
  source 1..22: mol_type = other RNA
gcatcaggtaagttcctgaagt

SEQ ID NO: 1317 - RNA, 22 nt, synthetic construct
  source 1..22: mol_type = other RNA
catcaggtaagttcctgaagtg

SEQ ID NO: 1318 - RNA, 22 nt, synthetic construct
  source 1..22: mol_type = other RNA
atcaggtaagttcctgaagtgg

SEQ ID NO: 1319 - RNA, 22 nt, synthetic construct
  source 1..22: mol_type = other RNA
tcaggtaagttcctgaagtgga

SEQ ID NO: 1320 - RNA, 22 nt, synthetic construct
  source 1..22: mol_type = other RNA
caggtaagttcctgaagtggag

SEQ ID NO: 1321 - RNA, 22 nt, synthetic construct
  source 1..22: mol_type = other RNA
aggtaagttcctgaagtggagg

SEQ ID NO: 1322 - RNA, 22 nt, synthetic construct
  source 1..22: mol_type = other RNA
ggtaagttcctgaagtggaggt

SEQ ID NO: 1323 - RNA, 22 nt, synthetic construct
  source 1..22: mol_type = other RNA
gtaagttcctgaagtggaggtg

SEQ ID NO: 1324 - RNA, 22 nt, synthetic construct
  source 1..22: mol_type = other RNA
taagttcctgaagtggaggtgg

SEQ ID NO: 1325 - RNA, 22 nt, synthetic construct
  source 1..22: mol_type = other RNA
aagttcctgaagtggaggtggt

SEQ ID NO: 1326 - RNA, 22 nt, synthetic construct
  source 1..22: mol_type = other RNA
agttcctgaagtggaggtggtg

SEQ ID NO: 1327 - RNA, 22 nt, synthetic construct
  source 1..22: mol_type = other RNA
gttcctgaagtggaggtggtgg

SEQ ID NO: 1328 - RNA, 22 nt, synthetic construct
  source 1..22: mol_type = other RNA
ttcctgaagtggaggtggtgga

SEQ ID NO: 1329 - RNA, 22 nt, synthetic construct
  source 1..22: mol_type = other RNA
tcctgaagtggaggtggtggaa

SEQ ID NO: 1330 - RNA, 22 nt, synthetic construct
  source 1..22: mol_type = other RNA
cctgaagtggaggtggtggaaa

SEQ ID NO: 1331 - RNA, 22 nt, synthetic construct
  source 1..22: mol_type = other RNA
ctgaagtggaggtggtggaaac

SEQ ID NO: 1332 - RNA, 22 nt, synthetic construct
  source 1..22: mol_type = other RNA
tgaagtggaggtggtggaaacg

SEQ ID NO: 1333 - RNA, 23 nt, synthetic construct
  source 1..23: mol_type = other RNA
atgaggtctaatttagaagacag

SEQ ID NO: 1334 - RNA, 23 nt, synthetic construct
  source 1..23: mol_type = other RNA
tgaggtctaatttagaagacaga

SEQ ID NO: 1335 - RNA, 23 nt, synthetic construct
  source 1..23: mol_type = other RNA
gaggtctaatttagaagacagaa

SEQ ID NO: 1336 - RNA, 23 nt, synthetic construct
  source 1..23: mol_type = other RNA
aggtctaatttagaagacagaag

SEQ ID NO: 1337 - RNA, 23 nt, synthetic construct
  source 1..23: mol_type = other RNA
ggtctaatttagaagacagaagt

SEQ ID NO: 1338 - RNA, 23 nt, synthetic construct
  source 1..23: mol_type = other RNA
gtctaatttagaagacagaagtg

SEQ ID NO: 1339 - RNA, 23 nt, synthetic construct
  source 1..23: mol_type = other RNA
tctaatttagaagacagaagtga

SEQ ID NO: 1340 - RNA, 23 nt, synthetic construct
  source 1..23: mol_type = other RNA
ctaatttagaagacagaagtgag

SEQ ID NO: 1341 - RNA, 23 nt, synthetic construct
  source 1..23: mol_type = other RNA
taatttagaagacagaagtgagg

SEQ ID NO: 1342 - RNA, 23 nt, synthetic construct
  source 1..23: mol_type = other RNA
aatttagaagacagaagtgaggc

SEQ ID NO: 1343 - RNA, 23 nt, synthetic construct
  source 1..23: mol_type = other RNA
atttagaagacagaagtgaggca

SEQ ID NO: 1344 - RNA, 23 nt, synthetic construct
  source 1..23: mol_type = other RNA
tttagaagacagaagtgaggcat

SEQ ID NO: 1345 - RNA, 23 nt, synthetic construct
  source 1..23: mol_type = other RNA
ttagaagacagaagtgaggcatc

SEQ ID NO: 1346 - RNA, 23 nt, synthetic construct
  source 1..23: mol_type = other RNA
tagaagacagaagtgaggcatca

SEQ ID NO: 1347 - RNA, 23 nt, synthetic construct
  source 1..23: mol_type = other RNA
agaagacagaagtgaggcatcag

SEQ ID NO: 1348 - RNA, 23 nt, synthetic construct
  source 1..23: mol_type = other RNA
gaagacagaagtgaggcatcagg

SEQ ID NO: 1349 - RNA, 23 nt, synthetic construct
  source 1..23: mol_type = other RNA
aagacagaagtgaggcatcaggt

SEQ ID NO: 1350 - RNA, 23 nt, synthetic construct
  source 1..23: mol_type = other RNA
agacagaagtgaggcatcaggta

SEQ ID NO: 1351 - RNA, 23 nt, synthetic construct
  source 1..23: mol_type = other RNA
gacagaagtgaggcatcaggtaa

SEQ ID NO: 1352 - RNA, 23 nt, synthetic construct
  source 1..23: mol_type = other RNA
acagaagtgaggcatcaggtaag

SEQ ID NO: 1353 - RNA, 23 nt, synthetic construct
  source 1..23: mol_type = other RNA
cagaagtgaggcatcaggtaagt

SEQ ID NO: 1354 - RNA, 23 nt, synthetic construct
  source 1..23: mol_type = other RNA
agaagtgaggcatcaggtaagtt

SEQ ID NO: 1355 - RNA, 23 nt, synthetic construct
  source 1..23: mol_type = other RNA
gaagtgaggcatcaggtaagttc

SEQ ID NO: 1356 - RNA, 23 nt, synthetic construct
  source 1..23: mol_type = other RNA
aagtgaggcatcaggtaagttcc

SEQ ID NO: 1357 - RNA, 23 nt, synthetic construct
  source 1..23: mol_type = other RNA
agtgaggcatcaggtaagttcct

SEQ ID NO: 1358 - RNA, 23 nt, synthetic construct
  source 1..23: mol_type = other RNA
gtgaggcatcaggtaagttcctg

SEQ ID NO: 1359 - RNA, 23 nt, synthetic construct
  source 1..23: mol_type = other RNA
tgaggcatcaggtaagttcctga

SEQ ID NO: 1360 - RNA, 23 nt, synthetic construct
  source 1..23: mol_type = other RNA
gaggcatcaggtaagttcctgaa

SEQ ID NO: 1361 - RNA, 23 nt, synthetic construct
  source 1..23: mol_type = other RNA
aggcatcaggtaagttcctgaag

SEQ ID NO: 1362 - RNA, 23 nt, synthetic construct
  source 1..23: mol_type = other RNA
ggcatcaggtaagttcctgaagt

SEQ ID NO: 1363 - RNA, 23 nt, synthetic construct
  source 1..23: mol_type = other RNA
gcatcaggtaagttcctgaagtg

SEQ ID NO: 1364 - RNA, 23 nt, synthetic construct
  source 1..23: mol_type = other RNA
catcaggtaagttcctgaagtgg

SEQ ID NO: 1365 - RNA, 23 nt, synthetic construct
  source 1..23: mol_type = other RNA
atcaggtaagttcctgaagtgga

SEQ ID NO: 1366 - RNA, 23 nt, synthetic construct
  source 1..23: mol_type = other RNA
tcaggtaagttcctgaagtggag

SEQ ID NO: 1367 - RNA, 23 nt, synthetic construct
  source 1..23: mol_type = other RNA
caggtaagttcctgaagtggagg

SEQ ID NO: 1368 - RNA, 23 nt, synthetic construct
  source 1..23: mol_type = other RNA
aggtaagttcctgaagtggaggt

SEQ ID NO: 1369 - RNA, 23 nt, synthetic construct
  source 1..23: mol_type = other RNA
ggtaagttcctgaagtggaggtg

SEQ ID NO: 1370 - RNA, 23 nt, synthetic construct
  source 1..23: mol_type = other RNA
gtaagttcctgaagtggaggtgg

SEQ ID NO: 1371 - RNA, 23 nt, synthetic construct
  source 1..23: mol_type = other RNA
taagttcctgaagtggaggtggt

SEQ ID NO: 1372 - RNA, 23 nt, synthetic construct
  source 1..23: mol_type = other RNA
aagttcctgaagtggaggtggtg

SEQ ID NO: 1373 - RNA, 23 nt, synthetic construct
  source 1..23: mol_type = other RNA
agttcctgaagtggaggtggtgg

SEQ ID NO: 1374 - RNA, 23 nt, synthetic construct
  source 1..23: mol_type = other RNA
gttcctgaagtggaggtggtgga

SEQ ID NO: 1375 - RNA, 23 nt, synthetic construct
  source 1..23: mol_type = other RNA
ttcctgaagtggaggtggtggaa

SEQ ID NO: 1376 - RNA, 23 nt, synthetic construct
  source 1..23: mol_type = other RNA
tcctgaagtggaggtggtggaaa

SEQ ID NO: 1377 - RNA, 23 nt, synthetic construct
  source 1..23: mol_type = other RNA
cctgaagtggaggtggtggaaac

SEQ ID NO: 1378 - RNA, 23 nt, synthetic construct
  source 1..23: mol_type = other RNA
ctgaagtggaggtggtggaaacg

SEQ ID NO: 1379 - RNA, 23 nt, synthetic construct
  source 1..23: mol_type = other RNA
tgaagtggaggtggtggaaacgg

SEQ ID NO: 1380 - RNA, 24 nt, synthetic construct
  source 1..24: mol_type = other RNA
atgaggtctaatttagaagacaga

SEQ ID NO: 1381 - RNA, 24 nt, synthetic construct
  source 1..24: mol_type = other RNA
tgaggtctaatttagaagacagaa

SEQ ID NO: 1382 - RNA, 24 nt, synthetic construct
  source 1..24: mol_type = other RNA
gaggtctaatttagaagacagaag

SEQ ID NO: 1383 - RNA, 24 nt, synthetic construct
  source 1..24: mol_type = other RNA
aggtctaatttagaagacagaagt

SEQ ID NO: 1384 - RNA, 24 nt, synthetic construct
  source 1..24: mol_type = other RNA
ggtctaatttagaagacagaagtg

SEQ ID NO: 1385 - RNA, 24 nt, synthetic construct
  source 1..24: mol_type = other RNA
gtctaatttagaagacagaagtga

SEQ ID NO: 1386 - RNA, 24 nt, synthetic construct
  source 1..24: mol_type = other RNA
tctaatttagaagacagaagtgag

SEQ ID NO: 1387 - RNA, 24 nt, synthetic construct
  source 1..24: mol_type = other RNA
ctaatttagaagacagaagtgagg

SEQ ID NO: 1388 - RNA, 24 nt, synthetic construct
  source 1..24: mol_type = other RNA
taatttagaagacagaagtgaggc

SEQ ID NO: 1389 - RNA, 24 nt, synthetic construct
  source 1..24: mol_type = other RNA
aatttagaagacagaagtgaggca

SEQ ID NO: 1390 - RNA, 24 nt, synthetic construct
  source 1..24: mol_type = other RNA
atttagaagacagaagtgaggcat

SEQ ID NO: 1391 - RNA, 24 nt, synthetic construct
  source 1..24: mol_type = other RNA
tttagaagacagaagtgaggcatc

SEQ ID NO: 1392 - RNA, 24 nt, synthetic construct
  source 1..24: mol_type = other RNA
ttagaagacagaagtgaggcatca

SEQ ID NO: 1393 - RNA, 24 nt, synthetic construct
  source 1..24: mol_type = other RNA
tagaagacagaagtgaggcatcag

SEQ ID NO: 1394 - RNA, 24 nt, synthetic construct
  source 1..24: mol_type = other RNA
agaagacagaagtgaggcatcagg

SEQ ID NO: 1395 - RNA, 24 nt, synthetic construct
  source 1..24: mol_type = other RNA
gaagacagaagtgaggcatcaggt

SEQ ID NO: 1396 - RNA, 24 nt, synthetic construct
  source 1..24: mol_type = other RNA
aagacagaagtgaggcatcaggta

SEQ ID NO: 1397 - RNA, 24 nt, synthetic construct
  source 1..24: mol_type = other RNA
agacagaagtgaggcatcaggtaa

SEQ ID NO: 1398 - RNA, 24 nt, synthetic construct
  source 1..24: mol_type = other RNA
gacagaagtgaggcatcaggtaag

SEQ ID NO: 1399 - RNA, 24 nt, synthetic construct
  source 1..24: mol_type = other RNA
acagaagtgaggcatcaggtaagt

SEQ ID NO: 1400 - RNA, 24 nt, synthetic construct
  source 1..24: mol_type = other RNA
cagaagtgaggcatcaggtaagtt

SEQ ID NO: 1401 - RNA, 24 nt, synthetic construct
  source 1..24: mol_type = other RNA
agaagtgaggcatcaggtaagttc

SEQ ID NO: 1402 - RNA, 24 nt, synthetic construct
  source 1..24: mol_type = other RNA
gaagtgaggcatcaggtaagttcc

SEQ ID NO: 1403 - RNA, 24 nt, synthetic construct
  source 1..24: mol_type = other RNA
aagtgaggcatcaggtaagttcct

SEQ ID NO: 1404 - RNA, 24 nt, synthetic construct
  source 1..24: mol_type = other RNA
agtgaggcatcaggtaagttcctg

SEQ ID NO: 1405 - RNA, 24 nt, synthetic construct
  source 1..24: mol_type = other RNA
gtgaggcatcaggtaagttcctga

SEQ ID NO: 1406 - RNA, 24 nt, synthetic construct
  source 1..24: mol_type = other RNA
tgaggcatcaggtaagttcctgaa

SEQ ID NO: 1407 - RNA, 24 nt, synthetic construct
  source 1..24: mol_type = other RNA
gaggcatcaggtaagttcctgaag

SEQ ID NO: 1408 - RNA, 24 nt, synthetic construct
  source 1..24: mol_type = other RNA
aggcatcaggtaagttcctgaagt

SEQ ID NO: 1409 - RNA, 24 nt, synthetic construct
  source 1..24: mol_type = other RNA
ggcatcaggtaagttcctgaagtg

SEQ ID NO: 1410 - RNA, 24 nt, synthetic construct
  source 1..24: mol_type = other RNA
gcatcaggtaagttcctgaagtgg

SEQ ID NO: 1411 - RNA, 24 nt, synthetic construct
  source 1..24: mol_type = other RNA
catcaggtaagttcctgaagtgga

SEQ ID NO: 1412 - RNA, 24 nt, synthetic construct
  source 1..24: mol_type = other RNA
atcaggtaagttcctgaagtggag

SEQ ID NO: 1413 - RNA, 24 nt, synthetic construct
  source 1..24: mol_type = other RNA
tcaggtaagttcctgaagtggagg

SEQ ID NO: 1414 - RNA, 24 nt, synthetic construct
  source 1..24: mol_type = other RNA
caggtaagttcctgaagtggaggt

SEQ ID NO: 1415 - RNA, 24 nt, synthetic construct
  source 1..24: mol_type = other RNA
aggtaagttcctgaagtggaggtg

SEQ ID NO: 1416 - RNA, 24 nt, synthetic construct
  source 1..24: mol_type = other RNA
ggtaagttcctgaagtggaggtgg

SEQ ID NO: 1417 - RNA, 24 nt, synthetic construct
  source 1..24: mol_type = other RNA
gtaagttcctgaagtggaggtggt

SEQ ID NO: 1418 - RNA, 24 nt, synthetic construct
  source 1..24: mol_type = other RNA
taagttcctgaagtggaggtggtg

SEQ ID NO: 1419 - RNA, 24 nt, synthetic construct
  source 1..24: mol_type = other RNA
aagttcctgaagtggaggtggtgg

SEQ ID NO: 1420 - RNA, 24 nt, synthetic construct
  source 1..24: mol_type = other RNA
agttcctgaagtggaggtggtgga

SEQ ID NO: 1421 - RNA, 24 nt, synthetic construct
  source 1..24: mol_type = other RNA
gttcctgaagtggaggtggtggaa

SEQ ID NO: 1422 - RNA, 24 nt, synthetic construct
  source 1..24: mol_type = other RNA
ttcctgaagtggaggtggtggaaa

SEQ ID NO: 1423 - RNA, 24 nt, synthetic construct
  source 1..24: mol_type = other RNA
tcctgaagtggaggtggtggaaac

SEQ ID NO: 1424 - RNA, 24 nt, synthetic construct
  source 1..24: mol_type = other RNA
cctgaagtggaggtggtggaaacg

SEQ ID NO: 1425 - RNA, 24 nt, synthetic construct
  source 1..24: mol_type = other RNA
ctgaagtggaggtggtggaaacgg

SEQ ID NO: 1426 - RNA, 24 nt, synthetic construct
  source 1..24: mol_type = other RNA
tgaagtggaggtggtggaaacgga

SEQ ID NO: 1427 - RNA, 25 nt, synthetic construct
  source 1..25: mol_type = other RNA
atgaggtctaatttagaagacagaa

SEQ ID NO: 1428 - RNA, 25 nt, synthetic construct
  source 1..25: mol_type = other RNA
tgaggtctaatttagaagacagaag

SEQ ID NO: 1429 - RNA, 25 nt, synthetic construct
  source 1..25: mol_type = other RNA
gaggtctaatttagaagacagaagt

SEQ ID NO: 1430 - RNA, 25 nt, synthetic construct
  source 1..25: mol_type = other RNA
aggtctaatttagaagacagaagtg

SEQ ID NO: 1431 - RNA, 25 nt, synthetic construct
  source 1..25: mol_type = other RNA
ggtctaatttagaagacagaagtga

SEQ ID NO: 1432 - RNA, 25 nt, synthetic construct
  source 1..25: mol_type = other RNA
gtctaatttagaagacagaagtgag

SEQ ID NO: 1433 - RNA, 25 nt, synthetic construct
  source 1..25: mol_type = other RNA
tctaatttagaagacagaagtgagg

SEQ ID NO: 1434 - RNA, 25 nt, synthetic construct
  source 1..25: mol_type = other RNA
ctaatttagaagacagaagtgaggc

SEQ ID NO: 1435 - RNA, 25 nt, synthetic construct
  source 1..25: mol_type = other RNA
taatttagaagacagaagtgaggca

SEQ ID NO: 1436 - RNA, 25 nt, synthetic construct
  source 1..25: mol_type = other RNA
aatttagaagacagaagtgaggcat

SEQ ID NO: 1437 - RNA, 25 nt, synthetic construct
  source 1..25: mol_type = other RNA
atttagaagacagaagtgaggcatc

SEQ ID NO: 1438 - RNA, 25 nt, synthetic construct
  source 1..25: mol_type = other RNA
tttagaagacagaagtgaggcatca

SEQ ID NO: 1439 - RNA, 25 nt, synthetic construct
  source 1..25: mol_type = other RNA
ttagaagacagaagtgaggcatcag

SEQ ID NO: 1440 - RNA, 25 nt, synthetic construct
  source 1..25: mol_type = other RNA
tagaagacagaagtgaggcatcagg

SEQ ID NO: 1441 - RNA, 25 nt, synthetic construct
  source 1..25: mol_type = other RNA
agaagacagaagtgaggcatcaggt

SEQ ID NO: 1442 - RNA, 25 nt, synthetic construct
  source 1..25: mol_type = other RNA
gaagacagaagtgaggcatcaggta

SEQ ID NO: 1443 - RNA, 25 nt, synthetic construct
  source 1..25: mol_type = other RNA
aagacagaagtgaggcatcaggtaa

SEQ ID NO: 1444 - RNA, 25 nt, synthetic construct
  source 1..25: mol_type = other RNA
agacagaagtgaggcatcaggtaag

SEQ ID NO: 1445 - RNA, 25 nt, synthetic construct
  source 1..25: mol_type = other RNA
gacagaagtgaggcatcaggtaagt

SEQ ID NO: 1446 - RNA, 25 nt, synthetic construct
  source 1..25: mol_type = other RNA
acagaagtgaggcatcaggtaagtt

SEQ ID NO: 1447 - RNA, 25 nt, synthetic construct
  source 1..25: mol_type = other RNA
cagaagtgaggcatcaggtaagttc

SEQ ID NO: 1448 - RNA, 25 nt, synthetic construct
  source 1..25: mol_type = other RNA
agaagtgaggcatcaggtaagttcc

SEQ ID NO: 1449 - RNA, 25 nt, synthetic construct
  source 1..25: mol_type = other RNA
gaagtgaggcatcaggtaagttcct

SEQ ID NO: 1450 - RNA, 25 nt, synthetic construct
  source 1..25: mol_type = other RNA
aagtgaggcatcaggtaagttcctg

SEQ ID NO: 1451 - RNA, 25 nt, synthetic construct
  source 1..25: mol_type = other RNA
agtgaggcatcaggtaagttcctga

SEQ ID NO: 1452 - RNA, 25 nt, synthetic construct
  source 1..25: mol_type = other RNA
gtgaggcatcaggtaagttcctgaa

SEQ ID NO: 1453 - RNA, 25 nt, synthetic construct
  source 1..25: mol_type = other RNA
tgaggcatcaggtaagttcctgaag

SEQ ID NO: 1454 - RNA, 25 nt, synthetic construct
  source 1..25: mol_type = other RNA
gaggcatcaggtaagttcctgaagt

SEQ ID NO: 1455 - RNA, 25 nt, synthetic construct
  source 1..25: mol_type = other RNA
aggcatcaggtaagttcctgaagtg

SEQ ID NO: 1456 - RNA, 25 nt, synthetic construct
  source 1..25: mol_type = other RNA
ggcatcaggtaagttcctgaagtgg

SEQ ID NO: 1457 - RNA, 25 nt, synthetic construct
  source 1..25: mol_type = other RNA
gcatcaggtaagttcctgaagtgga

SEQ ID NO: 1458 - RNA, 25 nt, synthetic construct
  source 1..25: mol_type = other RNA
catcaggtaagttcctgaagtggag

SEQ ID NO: 1459 - RNA, 25 nt, synthetic construct
  source 1..25: mol_type = other RNA
atcaggtaagttcctgaagtggagg

SEQ ID NO: 1460 - RNA, 25 nt, synthetic construct
  source 1..25: mol_type = other RNA
tcaggtaagttcctgaagtggaggt

SEQ ID NO: 1461 - RNA, 25 nt, synthetic construct
  source 1..25: mol_type = other RNA
caggtaagttcctgaagtggaggtg

SEQ ID NO: 1462 - RNA, 25 nt, synthetic construct
  source 1..25: mol_type = other RNA
aggtaagttcctgaagtggaggtgg

SEQ ID NO: 1463 - RNA, 25 nt, synthetic construct
  source 1..25: mol_type = other RNA
ggtaagttcctgaagtggaggtggt

SEQ ID NO: 1464 - RNA, 25 nt, synthetic construct
  source 1..25: mol_type = other RNA
gtaagttcctgaagtggaggtggtg

SEQ ID NO: 1465 - RNA, 25 nt, synthetic construct
  source 1..25: mol_type = other RNA
taagttcctgaagtggaggtggtgg

SEQ ID NO: 1466 - RNA, 25 nt, synthetic construct
  source 1..25: mol_type = other RNA
aagttcctgaagtggaggtggtgga

SEQ ID NO: 1467 - RNA, 25 nt, synthetic construct
  source 1..25: mol_type = other RNA
agttcctgaagtggaggtggtggaa

SEQ ID NO: 1468 - RNA, 25 nt, synthetic construct
  source 1..25: mol_type = other RNA
gttcctgaagtggaggtggtggaaa

SEQ ID NO: 1469 - RNA, 25 nt, synthetic construct
  source 1..25: mol_type = other RNA
ttcctgaagtggaggtggtggaaac

SEQ ID NO: 1470 - RNA, 25 nt, synthetic construct
  source 1..25: mol_type = other RNA
tcctgaagtggaggtggtggaaacg

SEQ ID NO: 1471 - RNA, 25 nt, synthetic construct
  source 1..25: mol_type = other RNA
cctgaagtggaggtggtggaaacgg

SEQ ID NO: 1472 - RNA, 25 nt, synthetic construct
  source 1..25: mol_type = other RNA
ctgaagtggaggtggtggaaacgga

SEQ ID NO: 1473 - RNA, 26 nt, synthetic construct
  source 1..26: mol_type = other RNA
atgaggtctaatttagaagacagaag

SEQ ID NO: 1474 - RNA, 26 nt, synthetic construct
  source 1..26: mol_type = other RNA
tgaggtctaatttagaagacagaagt

SEQ ID NO: 1475 - RNA, 26 nt, synthetic construct
  source 1..26: mol_type = other RNA
gaggtctaatttagaagacagaagtg

SEQ ID NO: 1476 - RNA, 26 nt, synthetic construct
  source 1..26: mol_type = other RNA
aggtctaatttagaagacagaagtga

SEQ ID NO: 1477 - RNA, 26 nt, synthetic construct
  source 1..26: mol_type = other RNA
ggtctaatttagaagacagaagtgag

SEQ ID NO: 1478 - RNA, 26 nt, synthetic construct
  source 1..26: mol_type = other RNA
gtctaatttagaagacagaagtgagg

SEQ ID NO: 1479 - RNA, 26 nt, synthetic construct
  source 1..26: mol_type = other RNA
tctaatttagaagacagaagtgaggc

SEQ ID NO: 1480 - RNA, 26 nt, synthetic construct
  source 1..26: mol_type = other RNA
ctaatttagaagacagaagtgaggca

SEQ ID NO: 1481 - RNA, 26 nt, synthetic construct
  source 1..26: mol_type = other RNA
taatttagaagacagaagtgaggcat

SEQ ID NO: 1482 - RNA, 26 nt, synthetic construct
  source 1..26: mol_type = other RNA
aatttagaagacagaagtgaggcatc

SEQ ID NO: 1483 - RNA, 26 nt, synthetic construct
  source 1..26: mol_type = other RNA
atttagaagacagaagtgaggcatca

SEQ ID NO: 1484 - RNA, 26 nt, synthetic construct
  source 1..26: mol_type = other RNA
tttagaagacagaagtgaggcatcag

SEQ ID NO: 1485 - RNA, 26 nt, synthetic construct
  source 1..26: mol_type = other RNA
ttagaagacagaagtgaggcatcagg

SEQ ID NO: 1486 - RNA, 26 nt, synthetic construct
  source 1..26: mol_type = other RNA
tagaagacagaagtgaggcatcaggt

SEQ ID NO: 1487 - RNA, 26 nt, synthetic construct
  source 1..26: mol_type = other RNA
agaagacagaagtgaggcatcaggta

SEQ ID NO: 1488 - RNA, 26 nt, synthetic construct
  source 1..26: mol_type = other RNA
gaagacagaagtgaggcatcaggtaa

SEQ ID NO: 1489 - RNA, 26 nt, synthetic construct
  source 1..26: mol_type = other RNA
aagacagaagtgaggcatcaggtaag

SEQ ID NO: 1490 - RNA, 26 nt, synthetic construct
  source 1..26: mol_type = other RNA
agacagaagtgaggcatcaggtaagt

SEQ ID NO: 1491 - RNA, 26 nt, synthetic construct
  source 1..26: mol_type = other RNA
gacagaagtgaggcatcaggtaagtt

SEQ ID NO: 1492 - RNA, 26 nt, synthetic construct
  source 1..26: mol_type = other RNA
acagaagtgaggcatcaggtaagttc

SEQ ID NO: 1493 - RNA, 26 nt, synthetic construct
  source 1..26: mol_type = other RNA
cagaagtgaggcatcaggtaagttcc

SEQ ID NO: 1494 - RNA, 26 nt, synthetic construct
  source 1..26: mol_type = other RNA
agaagtgaggcatcaggtaagttcct

SEQ ID NO: 1495 - RNA, 26 nt, synthetic construct
  source 1..26: mol_type = other RNA
gaagtgaggcatcaggtaagttcctg

SEQ ID NO: 1496 - RNA, 26 nt, synthetic construct
  source 1..26: mol_type = other RNA
aagtgaggcatcaggtaagttcctga

SEQ ID NO: 1497 - RNA, 26 nt, synthetic construct
  source 1..26: mol_type = other RNA
agtgaggcatcaggtaagttcctgaa

SEQ ID NO: 1498 - RNA, 26 nt, synthetic construct
  source 1..26: mol_type = other RNA
gtgaggcatcaggtaagttcctgaag

SEQ ID NO: 1499 - RNA, 26 nt, synthetic construct
  source 1..26: mol_type = other RNA
tgaggcatcaggtaagttcctgaagt

SEQ ID NO: 1500 - RNA, 26 nt, synthetic construct
  source 1..26: mol_type = other RNA
gaggcatcaggtaagttcctgaagtg

SEQ ID NO: 1501 - RNA, 26 nt, synthetic construct
  source 1..26: mol_type = other RNA
aggcatcaggtaagttcctgaagtgg

SEQ ID NO: 1502 - RNA, 26 nt, synthetic construct
  source 1..26: mol_type = other RNA
ggcatcaggtaagttcctgaagtgga

SEQ ID NO: 1503 - RNA, 26 nt, synthetic construct
  source 1..26: mol_type = other RNA
gcatcaggtaagttcctgaagtggag

SEQ ID NO: 1504 - RNA, 26 nt, synthetic construct
  source 1..26: mol_type = other RNA
catcaggtaagttcctgaagtggagg

SEQ ID NO: 1505 - RNA, 26 nt, synthetic construct
  source 1..26: mol_type = other RNA
atcaggtaagttcctgaagtggaggt

SEQ ID NO: 1506 - RNA, 26 nt, synthetic construct
  source 1..26: mol_type = other RNA
tcaggtaagttcctgaagtggaggtg

SEQ ID NO: 1507 - RNA, 26 nt, synthetic construct
  source 1..26: mol_type = other RNA
caggtaagttcctgaagtggaggtgg

SEQ ID NO: 1508 - RNA, 26 nt, synthetic construct
  source 1..26: mol_type = other RNA
aggtaagttcctgaagtggaggtggt

SEQ ID NO: 1509 - RNA, 26 nt, synthetic construct
  source 1..26: mol_type = other RNA
ggtaagttcctgaagtggaggtggtg

SEQ ID NO: 1510 - RNA, 26 nt, synthetic construct
  source 1..26: mol_type = other RNA
gtaagttcctgaagtggaggtggtgg

SEQ ID NO: 1511 - RNA, 26 nt, synthetic construct
  source 1..26: mol_type = other RNA
taagttcctgaagtggaggtggtgga

SEQ ID NO: 1512 - RNA, 26 nt, synthetic construct
  source 1..26: mol_type = other RNA
aagttcctgaagtggaggtggtggaa

SEQ ID NO: 1513 - RNA, 26 nt, synthetic construct
  source 1..26: mol_type = other RNA
agttcctgaagtggaggtggtggaaa

SEQ ID NO: 1514 - RNA, 26 nt, synthetic construct
  source 1..26: mol_type = other RNA
gttcctgaagtggaggtggtggaaac

SEQ ID NO: 1515 - RNA, 26 nt, synthetic construct
  source 1..26: mol_type = other RNA
ttcctgaagtggaggtggtggaaacg

SEQ ID NO: 1516 - RNA, 26 nt, synthetic construct
  source 1..26: mol_type = other RNA
tcctgaagtggaggtggtggaaacgg

SEQ ID NO: 1517 - RNA, 26 nt, synthetic construct
  source 1..26: mol_type = other RNA
cctgaagtggaggtggtggaaacgga

SEQ ID NO: 1518 - RNA, 20 nt, synthetic construct
  source 1..20: mol_type = other RNA
ttcttagcatatattaaatg

SEQ ID NO: 1519 - RNA, 20 nt, synthetic construct
  source 1..20: mol_type = other RNA
ctttgtttcttagcatatat

SEQ ID NO: 1520 - RNA, 20 nt, synthetic construct
  source 1..20: mol_type = other RNA
attttctttgtttcttagca

SEQ ID NO: 1521 - RNA, 20 nt, synthetic construct
  source 1..20: mol_type = other RNA
tgcctttctattttctttgt

SEQ ID NO: 1522 - RNA, 20 nt, synthetic construct
  source 1..20: mol_type = other RNA
aataatgcctttctattttc

SEQ ID NO: 1523 - RNA, 20 nt, synthetic construct
  source 1..20: mol_type = other RNA
agcatcaaccgacagtgagc

SEQ ID NO: 1524 - RNA, 20 nt, synthetic construct
  source 1..20: mol_type = other RNA
cagtgttgacacacagcatc

SEQ ID NO: 1525 - RNA, 20 nt, synthetic construct
  source 1..20: mol_type = other RNA
acccacagtgttgacacaca

SEQ ID NO: 1526 - RNA, 20 nt, synthetic construct
  source 1..20: mol_type = other RNA
gggtcacccacagtgttgac

SEQ ID NO: 1527 - RNA, 20 nt, synthetic construct
  source 1..20: mol_type = other RNA
cagactgggtcacccacagt

SEQ ID NO: 1528 - RNA, 20 nt, synthetic construct
  source 1..20: mol_type = other RNA
attcccagactgggtcaccc

SEQ ID NO: 1529 - RNA, 20 nt, synthetic construct
  source 1..20: mol_type = other RNA
tagtctattcccagactggg

SEQ ID NO: 1530 - RNA, 20 nt, synthetic construct
  source 1..20: mol_type = other RNA
ggcctcattttagtctattc

SEQ ID NO: 1531 - RNA, 20 nt, synthetic construct
  source 1..20: mol_type = other RNA
ggaagggcctcattttagtc

SEQ ID NO: 1532 - RNA, 20 nt, synthetic construct
  source 1..20: mol_type = other RNA
atagccctcagggctggaag

SEQ ID NO: 1533 - RNA, 20 nt, synthetic construct
  source 1..20: mol_type = other RNA
tatttcccttccctatcagc

SEQ ID NO: 1534 - RNA, 20 nt, synthetic construct
  source 1..20: mol_type = other RNA
cgtgtatttatttcccttcc

SEQ ID NO: 1535 - RNA, 20 nt, synthetic construct
  source 1..20: mol_type = other RNA
gggatcaccgtgtatttatt

SEQ ID NO: 1536 - RNA, 20 nt, synthetic construct
  source 1..20: mol_type = other RNA
gccaatgggatcaccgtgta

SEQ ID NO: 1537 - RNA, 20 nt, synthetic construct
  source 1..20: mol_type = other RNA
aggacttacgtggccaatgg

SEQ ID NO: 1538 - RNA, 20 nt, synthetic construct
  source 1..20: mol_type = other RNA
gaagaaaggacttacgtggc

SEQ ID NO: 1539 - RNA, 20 nt, synthetic construct
  source 1..20: mol_type = other RNA
cctctgaagaaaggacttac

SEQ ID NO: 1540 - RNA, 20 nt, synthetic construct
  source 1..20: mol_type = other RNA
tctacctcaacggtgcctct

SEQ ID NO: 1541 - RNA, 20 nt, synthetic construct
  source 1..20: mol_type = other RNA
attctttagtcctctacctc

SEQ ID NO: 1542 - RNA, 20 nt, synthetic construct
  source 1..20: mol_type = other RNA
tcctaagcaattctttagtc

SEQ ID NO: 1543 - RNA, 20 nt, synthetic construct
  source 1..20: mol_type = other RNA
agttaactttggtgttacat

SEQ ID NO: 1544 - RNA, 20 nt, synthetic construct
  source 1..20: mol_type = other RNA
ttgcagaaatcaaatactgg

SEQ ID NO: 1545 - RNA, 20 nt, synthetic construct
  source 1..20: mol_type = other RNA
gtttcattgcagaaatcaaa

SEQ ID NO: 1546 - RNA, 20 nt, synthetic construct
  source 1..20: mol_type = other RNA
gcccaagtttcattgcagaa

SEQ ID NO: 1547 - RNA, 20 nt, synthetic construct
  source 1..20: mol_type = other RNA
acaattgccataaaatgccc

SEQ ID NO: 1548 - RNA, 20 nt, synthetic construct
  source 1..20: mol_type = other RNA
ttaaaagatgctacaattgc

SEQ ID NO: 1549 - RNA, 20 nt, synthetic construct
  source 1..20: mol_type = other RNA
gtggttttaaaagatgctac

SEQ ID NO: 1550 - RNA, 20 nt, synthetic construct
  source 1..20: mol_type = other RNA
tgcccattttgtggttttaa

SEQ ID NO: 1551 - RNA, 20 nt, synthetic construct
  source 1..20: mol_type = other RNA
ggaaaatgcccattttgtgg

SEQ ID NO: 1552 - RNA, 20 nt, synthetic construct
  source 1..20: mol_type = other RNA
ctatttagggggaaaatgcc

SEQ ID NO: 1553 - RNA, 20 nt, synthetic construct
  source 1..20: mol_type = other RNA
taagaagctatttaggggga

SEQ ID NO: 1554 - RNA, 20 nt, synthetic construct
  source 1..20: mol_type = other RNA
actcctaaaaatggattaag

SEQ ID NO: 1555 - RNA, 20 nt, synthetic construct
  source 1..20: mol_type = other RNA
atattaggggatgactccta

SEQ ID NO: 1556 - RNA, 20 nt, synthetic construct
  source 1..20: mol_type = other RNA
gtgacaaatattaggggatg

SEQ ID NO: 1557 - RNA, 20 nt, synthetic construct
  source 1..20: mol_type = other RNA
agaataatggtgacaaatat

SEQ ID NO: 1558 - RNA, 20 nt, synthetic construct
  source 1..20: mol_type = other RNA
gtaccaagaataatggtgac

SEQ ID NO: 1559 - RNA, 20 nt, synthetic construct
  source 1..20: mol_type = other RNA
tcctagtaccaagaataatg

SEQ ID NO: 1560 - RNA, 20 nt, synthetic construct
  source 1..20: mol_type = other RNA
atttttgtttcctagtacca

SEQ ID NO: 1561 - RNA, 20 nt, synthetic construct
  source 1..20: mol_type = other RNA
gcaagccccttgaataattt

SEQ ID NO: 1562 - RNA, 20 nt, synthetic construct
  source 1..20: mol_type = other RNA
actccaccccactctagatt

SEQ ID NO: 1563 - RNA, 20 nt, synthetic construct
  source 1..20: mol_type = other RNA
ttctgtttacactccacccc

SEQ ID NO: 1564 - RNA, 20 nt, synthetic construct
  source 1..20: mol_type = other RNA
ggagcttctgtttacactcc

SEQ ID NO: 1565 - RNA, 20 nt, synthetic construct
  source 1..20: mol_type = other RNA
tccctgtctaggagcttctg

SEQ ID NO: 1566 - RNA, 20 nt, synthetic construct
  source 1..20: mol_type = other RNA
gttgaagcctccatttccct

SEQ ID NO: 1567 - RNA, 20 nt, synthetic construct
  source 1..20: mol_type = other RNA
ctctggttgaagcctccatt

SEQ ID NO: 1568 - RNA, 20 nt, synthetic construct
  source 1..20: mol_type = other RNA
tctgtaacactgtgattgtc

SEQ ID NO: 1569 - RNA, 20 nt, synthetic construct
  source 1..20: mol_type = other RNA
ccccctgctgtgctctgtaa

SEQ ID NO: 1570 - RNA, 20 nt, synthetic construct
  source 1..20: mol_type = other RNA
ccctcactgctcacccccct

SEQ ID NO: 1571 - RNA, 20 nt, synthetic construct
  source 1..20: mol_type = other RNA
acctcgtcccctcactgctc

SEQ ID NO: 1572 - RNA, 20 nt, synthetic construct
  source 1..20: mol_type = other RNA
tttctgtgggcaacctcgtc

SEQ ID NO: 1573 - RNA, 20 nt, synthetic construct
  source 1..20: mol_type = other RNA
gttcttttctgtgggcaacc

SEQ ID NO: 1574 - RNA, 20 nt, synthetic construct
  source 1..20: mol_type = other RNA
gtttaatagaagttcttttc

SEQ ID NO: 1575 - RNA, 20 nt, synthetic construct
  source 1..20: mol_type = other RNA
gagctgttgtttaatagaag

SEQ ID NO: 1576 - RNA, 20 nt, synthetic construct
  source 1..20: mol_type = other RNA
tttatgagctgttgtttaat

SEQ ID NO: 1577 - RNA, 20 nt, synthetic construct
  source 1..20: mol_type = other RNA
gaagtgataacttatttatg

SEQ ID NO: 1578 - RNA, 20 nt, synthetic construct
  source 1..20: mol_type = other RNA
acatttgaagtgataactta

SEQ ID NO: 1579 - RNA, 20 nt, synthetic construct
  source 1..20: mol_type = other RNA
attaaacatttgaagtgata

SEQ ID NO: 1580 - RNA, 20 nt, synthetic construct
  source 1..20: mol_type = other RNA
ggtttttattaaacatttga

SEQ ID NO: 1581 - RNA, 20 nt, synthetic construct
  source 1..20: mol_type = other RNA
agtagtggtttttattaaac

SEQ ID NO: 1582 - RNA, 20 nt, synthetic construct
  source 1..20: mol_type = other RNA
ggagttagtagtggttttta

SEQ ID NO: 1583 - RNA, 20 nt, synthetic construct
  source 1..20: mol_type = other RNA
ttaatattaggagttagtag

SEQ ID NO: 1584 - RNA, 20 nt, synthetic construct
  source 1..20: mol_type = other RNA
tacctaaaactttttaatat

SEQ ID NO: 1585 - RNA, 20 nt, synthetic construct
  source 1..20: mol_type = other RNA
tggttatacctaaaactttt

SEQ ID NO: 1586 - RNA, 20 nt, synthetic construct
  source 1..20: mol_type = other RNA
caaattatagtggttatacc

SEQ ID NO: 1587 - RNA, 20 nt, synthetic construct
  source 1..20: mol_type = other RNA
gttagagacaaattatagtg

SEQ ID NO: 1588 - RNA, 20 nt, synthetic construct
  source 1..20: mol_type = other RNA
tagagatgttagagacaaat

SEQ ID NO: 1589 - RNA, 20 nt, synthetic construct
  source 1..20: mol_type = other RNA
gagggggaatagctttttag

SEQ ID NO: 1590 - RNA, 20 nt, synthetic construct
  source 1..20: mol_type = other RNA
cattttgagggggaatagct

SEQ ID NO: 1591 - RNA, 20 nt, synthetic construct
  source 1..20: mol_type = other RNA
gtcaacattttgagggggaa

SEQ ID NO: 1592 - RNA, 20 nt, synthetic construct
  source 1..20: mol_type = other RNA
cagtatttgtcaacattttg

SEQ ID NO: 1593 - RNA, 20 nt, synthetic construct
  source 1..20: mol_type = other RNA
aaagacagtatttgtcaaca

SEQ ID NO: 1594 - RNA, 20 nt, synthetic construct
  source 1..20: mol_type = other RNA
ctgggaataaaagacagtat

SEQ ID NO: 1595 - RNA, 20 nt, synthetic construct
  source 1..20: mol_type = other RNA
tcagactgggaataaaagac

SEQ ID NO: 1596 - RNA, 20 nt, synthetic construct
  source 1..20: mol_type = other RNA
ttattcacacttcagactgg

SEQ ID NO: 1597 - RNA, 20 nt, synthetic construct
  source 1..20: mol_type = other RNA
aaatattattcacacttcag

SEQ ID NO: 1598 - RNA, 20 nt, synthetic construct
  source 1..20: mol_type = other RNA
agatcaaatattattcacac

SEQ ID NO: 1599 - RNA, 20 nt, synthetic construct
  source 1..20: mol_type = other RNA
ttgagcacagagatcaaata

SEQ ID NO: 1600 - RNA, 20 nt, synthetic construct
  source 1..20: mol_type = other RNA
ctaatggcttgagcacagag

SEQ ID NO: 1601 - RNA, 20 nt, synthetic construct
  source 1..20: mol_type = other RNA
tcacatattgctaatggctt

SEQ ID NO: 1602 - RNA, 20 nt, synthetic construct
  source 1..20: mol_type = other RNA
cagtgggagtcacatattgc

SEQ ID NO: 1603 - RNA, 20 nt, synthetic construct
  source 1..20: mol_type = other RNA
caagccagtgggagtcacat

SEQ ID NO: 1604 - RNA, 20 nt, synthetic construct
  source 1..20: mol_type = other RNA
taggtcacccaagccagtgg

SEQ ID NO: 1605 - RNA, 20 nt, synthetic construct
  source 1..20: mol_type = other RNA
tttcagtttttaggtcaccc

SEQ ID NO: 1606 - RNA, 20 nt, synthetic construct
  source 1..20: mol_type = other RNA
tctaatttcagtttttaggt

SEQ ID NO: 1607 - RNA, 20 nt, synthetic construct
  source 1..20: mol_type = other RNA
tttgtttctaggatctaatt

SEQ ID NO: 1608 - RNA, 20 nt, synthetic construct
  source 1..20: mol_type = other RNA
gaaagtttgtttctaggatc

SEQ ID NO: 1609 - RNA, 20 nt, synthetic construct
  source 1..20: mol_type = other RNA
tagaggggagaaagtttgtt

SEQ ID NO: 1610 - RNA, 20 nt, synthetic construct
  source 1..20: mol_type = other RNA
atgtttagaggggagaaagt

SEQ ID NO: 1611 - RNA, 20 nt, synthetic construct
  source 1..20: mol_type = other RNA
atgagctgtggatgcatgtt

SEQ ID NO: 1612 - RNA, 20 nt, synthetic construct
  source 1..20: mol_type = other RNA
aaaaaatgagctgtggatgc

SEQ ID NO: 1613 - RNA, 20 nt, synthetic construct
  source 1..20: mol_type = other RNA
cccggttttcaaaaatatag

SEQ ID NO: 1614 - RNA, 20 nt, synthetic construct
  source 1..20: mol_type = other RNA
ccgtactcatttcttcattg

SEQ ID NO: 1615 - RNA, 20 nt, synthetic construct
  source 1..20: mol_type = other RNA
ccgactttatcttttctcca

SEQ ID NO: 1616 - RNA, 20 nt, synthetic construct
  source 1..20: mol_type = other RNA
gctggtttaatgcagaacta

SEQ ID NO: 1617 - RNA, 20 nt, synthetic construct
  source 1..20: mol_type = other RNA
acccttgaaagctggtttaa

SEQ ID NO: 1618 - RNA, 20 nt, synthetic construct
  source 1..20: mol_type = other RNA
caaattctacccttgaaagc

SEQ ID NO: 1619 - RNA, 20 nt, synthetic construct
  source 1..20: mol_type = other RNA
caatgatcacaaattctacc

SEQ ID NO: 1620 - RNA, 20 nt, synthetic construct
  source 1..20: mol_type = other RNA
cacagattcaatgatcacaa

SEQ ID NO: 1621 - RNA, 20 nt, synthetic construct
  source 1..20: mol_type = other RNA
gataatcacagattcaatga

SEQ ID NO: 1622 - RNA, 20 nt, synthetic construct
  source 1..20: mol_type = other RNA
gctctgataatcacagattc

SEQ ID NO: 1623 - RNA, 20 nt, synthetic construct
  source 1..20: mol_type = other RNA
ttctgtttgctctgataatc

SEQ ID NO: 1624 - RNA, 20 nt, synthetic construct
  source 1..20: mol_type = other RNA
tgaaagcacaattctgtttg

SEQ ID NO: 1625 - RNA, 20 nt, synthetic construct
  source 1..20: mol_type = other RNA
gctttgtgaaagcacaattc

SEQ ID NO: 1626 - RNA, 20 nt, synthetic construct
  source 1..20: mol_type = other RNA
acttggctttgtgaaagcac

SEQ ID NO: 1627 - RNA, 20 nt, synthetic construct
  source 1..20: mol_type = other RNA
cttcttttttaacttggctt

SEQ ID NO: 1628 - RNA, 20 nt, synthetic construct
  source 1..20: mol_type = other RNA
cagtgggcttcttttttaac

SEQ ID NO: 1629 - RNA, 20 nt, synthetic construct
  source 1..20: mol_type = other RNA
aaaaataccagtgggcttct

SEQ ID NO: 1630 - RNA, 20 nt, synthetic construct
  source 1..20: mol_type = other RNA
tgaataatctgctcaaagta

SEQ ID NO: 1631 - RNA, 20 nt, synthetic construct
  source 1..20: mol_type = other RNA
ccgaatagattgaataatct

SEQ ID NO: 1632 - RNA, 20 nt, synthetic construct
  source 1..20: mol_type = other RNA
tacaaatggccgaatagatt

SEQ ID NO: 1633 - RNA, 20 nt, synthetic construct
  source 1..20: mol_type = other RNA
gggtgtgtggtacaaatggc

SEQ ID NO: 1634 - RNA, 20 nt, synthetic construct
  source 1..20: mol_type = other RNA
tgtacatgggtgtgtggtac

SEQ ID NO: 1635 - RNA, 20 nt, synthetic construct
  source 1..20: mol_type = other RNA
ttagagagagagagagtggt

SEQ ID NO: 1636 - RNA, 20 nt, synthetic construct
  source 1..20: mol_type = other RNA
tatcaatctcttagagagag

SEQ ID NO: 1637 - RNA, 20 nt, synthetic construct
  source 1..20: mol_type = other RNA
ctatttcatgtatcaatctc

SEQ ID NO: 1638 - RNA, 20 nt, synthetic construct
  source 1..20: mol_type = other RNA
gcaatgctatttcatgtatc

SEQ ID NO: 1639 - RNA, 20 nt, synthetic construct
  source 1..20: mol_type = other RNA
ctttatagcaatgctatttc

SEQ ID NO: 1640 - RNA, 20 nt, synthetic construct
  source 1..20: mol_type = other RNA
gttgctgtcttctttatagc

SEQ ID NO: 1641 - RNA, 20 nt, synthetic construct
  source 1..20: mol_type = other RNA
ctcttggttgctgtcttctt

SEQ ID NO: 1642 - RNA, 20 nt, synthetic construct
  source 1..20: mol_type = other RNA
gtatacaatacagatgactc

SEQ ID NO: 1643 - RNA, 20 nt, synthetic construct
  source 1..20: mol_type = other RNA
acattgtatacaatacagat

SEQ ID NO: 1644 - RNA, 20 nt, synthetic construct
  source 1..20: mol_type = other RNA
gatttcacaacattgtatac

SEQ ID NO: 1645 - RNA, 20 nt, synthetic construct
  source 1..20: mol_type = other RNA
gcattaatgatttcacaaca

SEQ ID NO: 1646 - RNA, 20 nt, synthetic construct
  source 1..20: mol_type = other RNA
caggatgcattaatgatttc

SEQ ID NO: 1647 - RNA, 20 nt, synthetic construct
  source 1..20: mol_type = other RNA
agaaacttacaggatgcatt

SEQ ID NO: 1648 - RNA, 20 nt, synthetic construct
  source 1..20: mol_type = other RNA
acaatacttggatagaaact

SEQ ID NO: 1649 - RNA, 20 nt, synthetic construct
  source 1..20: mol_type = other RNA
tccagtgtaaacaacgctac

SEQ ID NO: 1650 - RNA, 20 nt, synthetic construct
  source 1..20: mol_type = other RNA
gtctcttgtccagtgtaaac

SEQ ID NO: 1651 - RNA, 20 nt, synthetic construct
  source 1..20: mol_type = other RNA
cattggtctcttgtccagtg

SEQ ID NO: 1652 - RNA, 20 nt, synthetic construct
  source 1..20: mol_type = other RNA
ggtttattaaacattggtct

SEQ ID NO: 1653 - RNA, 20 nt, synthetic construct
  source 1..20: mol_type = other RNA
gtgtttctggtttattaaac

SEQ ID NO: 1654 - RNA, 20 nt, synthetic construct
  source 1..20: mol_type = other RNA
tactttgtggagtggagtgt

SEQ ID NO: 1655 - RNA, 20 nt, synthetic construct
  source 1..20: mol_type = other RNA
ccctttaactcttactttgt

SEQ ID NO: 1656 - RNA, 20 nt, synthetic construct
  source 1..20: mol_type = other RNA
gtctctgcaaatccattccc

SEQ ID NO: 1657 - RNA, 20 nt, synthetic construct
  source 1..20: mol_type = other RNA
gtaacttatacttgtctctg

SEQ ID NO: 1658 - RNA, 20 nt, synthetic construct
  source 1..20: mol_type = other RNA
aggtaagtaacttatacttg

SEQ ID NO: 1659 - RNA, 20 nt, synthetic construct
  source 1..20: mol_type = other RNA
atattcacaggtaagtaact

SEQ ID NO: 1660 - RNA, 20 nt, synthetic construct
  source 1..20: mol_type = other RNA
ctcaaattcatattcacagg

SEQ ID NO: 1661 - RNA, 20 nt, synthetic construct
  source 1..20: mol_type = other RNA
ctctggcttcctcaaattca

SEQ ID NO: 1662 - RNA, 20 nt, synthetic construct
  source 1..20: mol_type = other RNA
atttcctctggcttcctcaa

SEQ ID NO: 1663 - RNA, 20 nt, synthetic construct
  source 1..20: mol_type = other RNA
cagtggagtccattatttcc

SEQ ID NO: 1664 - RNA, 20 nt, synthetic construct
  source 1..20: mol_type = other RNA
ctccacagtggagtccatta

SEQ ID NO: 1665 - RNA, 20 nt, synthetic construct
  source 1..20: mol_type = other RNA
cttttaactctccacagtgg

SEQ ID NO: 1666 - RNA, 20 nt, synthetic construct
  source 1..20: mol_type = other RNA
aggttgtgaaaccttttaac

SEQ ID NO: 1667 - RNA, 20 nt, synthetic construct
  source 1..20: mol_type = other RNA
gttggaaaaggttgtgaaac

SEQ ID NO: 1668 - RNA, 20 nt, synthetic construct
  source 1..20: mol_type = other RNA
atgaaaaccgaggttggaaa

SEQ ID NO: 1669 - RNA, 20 nt, synthetic construct
  source 1..20: mol_type = other RNA
ctttagaatgatgaaaaccg

SEQ ID NO: 1670 - RNA, 20 nt, synthetic construct
  source 1..20: mol_type = other RNA
aattctgttcagtgctttag

SEQ ID NO: 1671 - RNA, 20 nt, synthetic construct
  source 1..20: mol_type = other RNA
gaaaaagtttgaattctgtt

SEQ ID NO: 1672 - RNA, 20 nt, synthetic construct
  source 1..20: mol_type = other RNA
gttcttgaaaaagtttgaat

SEQ ID NO: 1673 - RNA, 20 nt, synthetic construct
  source 1..20: mol_type = other RNA
gataatgttcttgaaaaagt

SEQ ID NO: 1674 - RNA, 20 nt, synthetic construct
  source 1..20: mol_type = other RNA
cttaggcaaatagataatgt

SEQ ID NO: 1675 - RNA, 20 nt, synthetic construct
  source 1..20: mol_type = other RNA
cattgatccttaggcaaata

SEQ ID NO: 1676 - RNA, 20 nt, synthetic construct
  source 1..20: mol_type = other RNA
gcccttagggacattgatcc

SEQ ID NO: 1677 - RNA, 20 nt, synthetic construct
  source 1..20: mol_type = other RNA
ttgggctgcccttagggaca

SEQ ID NO: 1678 - RNA, 20 nt, synthetic construct
  source 1..20: mol_type = other RNA
tgtgcttgggctgcccttag

SEQ ID NO: 1679 - RNA, 20 nt, synthetic construct
  source 1..20: mol_type = other RNA
tgaactgtgcttgggctgcc

SEQ ID NO: 1680 - RNA, 20 nt, synthetic construct
  source 1..20: mol_type = other RNA
tgtgtttggggttattgctc

SEQ ID NO: 1681 - RNA, 20 nt, synthetic construct
  source 1..20: mol_type = other RNA
cactctgtgtttggggttat

SEQ ID NO: 1682 - RNA, 20 nt, synthetic construct
  source 1..20: mol_type = other RNA
cccaagcacactctgtgttt

SEQ ID NO: 1683 - RNA, 20 nt, synthetic construct
  source 1..20: mol_type = other RNA
gagggtttcccaagcacact

SEQ ID NO: 1684 - RNA, 20 nt, synthetic construct
  source 1..20: mol_type = other RNA
caccctcagagggtttccca

SEQ ID NO: 1685 - RNA, 20 nt, synthetic construct
  source 1..20: mol_type = other RNA
gttgacaccctcagagggtt

SEQ ID NO: 1686 - RNA, 20 nt, synthetic construct
  source 1..20: mol_type = other RNA
aggcctgttgacaccctcag

SEQ ID NO: 1687 - RNA, 20 nt, synthetic construct
  source 1..20: mol_type = other RNA
aatttccaaggcctgttgac

SEQ ID NO: 1688 - RNA, 20 nt, synthetic construct
  source 1..20: mol_type = other RNA
gtgaatcagcaatttccaag

SEQ ID NO: 1689 - RNA, 20 nt, synthetic construct
  source 1..20: mol_type = other RNA
cgttccaaggtgaatcagca

SEQ ID NO: 1690 - RNA, 20 nt, synthetic construct
  source 1..20: mol_type = other RNA
atttgcctctcgttccaagg

SEQ ID NO: 1691 - RNA, 20 nt, synthetic construct
  source 1..20: mol_type = other RNA
actctgctcaatttgcctct

SEQ ID NO: 1692 - RNA, 20 nt, synthetic construct
  source 1..20: mol_type = other RNA
ctgggcccactctgctcaat

SEQ ID NO: 1693 - RNA, 20 nt, synthetic construct
  source 1..20: mol_type = other RNA
tcttgctgggcccactctgc

SEQ ID NO: 1694 - RNA, 20 nt, synthetic construct
  source 1..20: mol_type = other RNA
agggctcttgctgggcccac

SEQ ID NO: 1695 - RNA, 20 nt, synthetic construct
  source 1..20: mol_type = other RNA
ctgaattccagggctcttgc

SEQ ID NO: 1696 - RNA, 20 nt, synthetic construct
  source 1..20: mol_type = other RNA
ggatagcctgaattccaggg

SEQ ID NO: 1697 - RNA, 20 nt, synthetic construct
  source 1..20: mol_type = other RNA
aaataagggttgggatagcc

SEQ ID NO: 1698 - RNA, 20 nt, synthetic construct
  source 1..20: mol_type = other RNA
aggcctgtaaaaaataaggg

SEQ ID NO: 1699 - RNA, 20 nt, synthetic construct
  source 1..20: mol_type = other RNA
actacaggcctgtaaaaaat

SEQ ID NO: 1700 - RNA, 20 nt, synthetic construct
  source 1..20: mol_type = other RNA
ttcacaactacaggcctgta

SEQ ID NO: 1701 - RNA, 20 nt, synthetic construct
  source 1..20: mol_type = other RNA
agtaacttttcacaactaca

SEQ ID NO: 1702 - RNA, 20 nt, synthetic construct
  source 1..20: mol_type = other RNA
gtttttaagtaacttttcac

SEQ ID NO: 1703 - RNA, 20 nt, synthetic construct
  source 1..20: mol_type = other RNA
cttgttatgtttttaagtaa

SEQ ID NO: 1704 - RNA, 20 nt, synthetic construct
  source 1..20: mol_type = other RNA
gagggggaaagtttaaaggt

SEQ ID NO: 1705 - RNA, 20 nt, synthetic construct
  source 1..20: mol_type = other RNA
ttatattgagggggaaagtt

SEQ ID NO: 1706 - RNA, 20 nt, synthetic construct
  source 1..20: mol_type = other RNA
tccaagagcaatcttttata

SEQ ID NO: 1707 - RNA, 20 nt, synthetic construct
  source 1..20: mol_type = other RNA
gggattttccaagagcaatc

SEQ ID NO: 1708 - RNA, 20 nt, synthetic construct
  source 1..20: mol_type = other RNA
gcaaccagggattttccaag

SEQ ID NO: 1709 - RNA, 20 nt, synthetic construct
  source 1..20: mol_type = other RNA
atcctgcaaccagggatttt

SEQ ID NO: 1710 - RNA, 20 nt, synthetic construct
  source 1..20: mol_type = other RNA
tctggatcctgcaaccaggg

SEQ ID NO: 1711 - RNA, 20 nt, synthetic construct
  source 1..20: mol_type = other RNA
ggccaggagcatctggatcc

SEQ ID NO: 1712 - RNA, 20 nt, synthetic construct
  source 1..20: mol_type = other RNA
agctgggccaggagcatctg

SEQ ID NO: 1713 - RNA, 20 nt, synthetic construct
  source 1..20: mol_type = other RNA
tctatagctgggccaggagc

SEQ ID NO: 1714 - RNA, 20 nt, synthetic construct
  source 1..20: mol_type = other RNA
caaaactctatagctgggcc

SEQ ID NO: 1715 - RNA, 20 nt, synthetic construct
  source 1..20: mol_type = other RNA
gctgtttcaaatgttctttt

SEQ ID NO: 1716 - RNA, 20 nt, synthetic construct
  source 1..20: mol_type = other RNA
tttgagcaaggctgtttcaa

SEQ ID NO: 1717 - RNA, 20 nt, synthetic construct
  source 1..20: mol_type = other RNA
ctcagacttttgagcaaggc

SEQ ID NO: 1718 - RNA, 20 nt, synthetic construct
  source 1..20: mol_type = other RNA
gtgcactcagacttttgagc

SEQ ID NO: 1719 - RNA, 20 nt, synthetic construct
  source 1..20: mol_type = other RNA
agttgtctgtgcactcagac

SEQ ID NO: 1720 - RNA, 20 nt, synthetic construct
  source 1..20: mol_type = other RNA
ggtgcaagagttgtctgtgc

SEQ ID NO: 1721 - RNA, 20 nt, synthetic construct
  source 1..20: mol_type = other RNA
gtccatgccagggtgcaaga

SEQ ID NO: 1722 - RNA, 20 nt, synthetic construct
  source 1..20: mol_type = other RNA
tcatctggtgtgtccatgcc

SEQ ID NO: 1723 - RNA, 20 nt, synthetic construct
  source 1..20: mol_type = other RNA
atacagagcttcatctggtg

SEQ ID NO: 1724 - RNA, 20 nt, synthetic construct
  source 1..20: mol_type = other RNA
catctttgcttatacagagc

SEQ ID NO: 1725 - RNA, 20 nt, synthetic construct
  source 1..20: mol_type = other RNA
agaaaatcgttcatctttgc

SEQ ID NO: 1726 - RNA, 20 nt, synthetic construct
  source 1..20: mol_type = other RNA
acctttagaaaatcgttcat

SEQ ID NO: 1727 - RNA, 20 nt, synthetic construct
  source 1..20: mol_type = other RNA
gacctgttcatttgaacctt

SEQ ID NO: 1728 - RNA, 20 nt, synthetic construct
  source 1..20: mol_type = other RNA
atttgactcaagacctgttc

SEQ ID NO: 1729 - RNA, 20 nt, synthetic construct
  source 1..20: mol_type = other RNA
gctccacatgcttatttgac

SEQ ID NO: 1730 - RNA, 20 nt, synthetic construct
  source 1..20: mol_type = other RNA
gaggagctccacatgcttat

SEQ ID NO: 1731 - RNA, 20 nt, synthetic construct
  source 1..20: mol_type = other RNA
tattggaggagctccacatg

SEQ ID NO: 1732 - RNA, 20 nt, synthetic construct
  source 1..20: mol_type = other RNA
caaatatattggaggagctc

SEQ ID NO: 1733 - RNA, 20 nt, synthetic construct
  source 1..20: mol_type = other RNA
gaggcagcacaaatatattg

SEQ ID NO: 1734 - RNA, 20 nt, synthetic construct
  source 1..20: mol_type = other RNA
tggaaagattcacaagaagg

SEQ ID NO: 1735 - RNA, 20 nt, synthetic construct
  source 1..20: mol_type = other RNA
ggaaaaatggaaagattcac

SEQ ID NO: 1736 - RNA, 20 nt, synthetic construct
  source 1..20: mol_type = other RNA
acattgtaggaaaaatggaa

SEQ ID NO: 1737 - RNA, 20 nt, synthetic construct
  source 1..20: mol_type = other RNA
aaaaataagaacattgtagg

SEQ ID NO: 1738 - RNA, 20 nt, synthetic construct
  source 1..20: mol_type = other RNA
gctcaggcaaaggagaaaaa

SEQ ID NO: 1739 - RNA, 20 nt, synthetic construct
  source 1..20: mol_type = other RNA
tttagggaaaagtaagctca

SEQ ID NO: 1740 - RNA, 20 nt, synthetic construct
  source 1..20: mol_type = other RNA
gaggcatttagggaaaagta

SEQ ID NO: 1741 - RNA, 20 nt, synthetic construct
  source 1..20: mol_type = other RNA
gcctattattattcattgct

SEQ ID NO: 1742 - RNA, 20 nt, synthetic construct
  source 1..20: mol_type = other RNA
atgttgcctattattattca

SEQ ID NO: 1743 - RNA, 20 nt, synthetic construct
  source 1..20: mol_type = other RNA
gtcttgaccaatgttgccta

SEQ ID NO: 1744 - RNA, 20 nt, synthetic construct
  source 1..20: mol_type = other RNA
ccaaccaagtcttgaccaat

SEQ ID NO: 1745 - RNA, 20 nt, synthetic construct
  source 1..20: mol_type = other RNA
ccaggcacccaaccaagtct

SEQ ID NO: 1746 - RNA, 20 nt, synthetic construct
  source 1..20: mol_type = other RNA
gtgggccaggcacccaacca

SEQ ID NO: 1747 - RNA, 18 nt, synthetic construct
  source 1..18: mol_type = other RNA
tcaaatactggagttgtg

SEQ ID NO: 1748 - RNA, 18 nt, synthetic construct
  source 1..18: mol_type = other RNA
caaatactggagttgtgt

SEQ ID NO: 1749 - RNA, 18 nt, synthetic construct
  source 1..18: mol_type = other RNA
gttttgcttggtcaagag

SEQ ID NO: 1750 - RNA, 18 nt, synthetic construct
  source 1..18: mol_type = other RNA
ggtcaagaggaaagaact

SEQ ID NO: 1751 - RNA, 19 nt, synthetic construct
  source 1..19: mol_type = other RNA
gcagaaatcaaatactgga

SEQ ID NO: 1752 - RNA, 19 nt, synthetic construct
  source 1..19: mol_type = other RNA
aatcaaatactggagttgt

SEQ ID NO: 1753 - RNA, 19 nt, synthetic construct
  source 1..19: mol_type = other RNA
atcaaatactggagttgtg

SEQ ID NO: 1754 - RNA, 19 nt, synthetic construct
  source 1..19: mol_type = other RNA
tcaaatactggagttgtgt

SEQ ID NO: 1755 - RNA, 19 nt, synthetic construct
  source 1..19: mol_type = other RNA
caaatactggagttgtgtt

SEQ ID NO: 1756 - RNA, 19 nt, synthetic construct
  source 1..19: mol_type = other RNA
aaatactggagttgtgttt

SEQ ID NO: 1757 - RNA, 19 nt, synthetic construct
  source 1..19: mol_type = other RNA
agttgtgttttgcttggtc

SEQ ID NO: 1758 - RNA, 19 nt, synthetic construct
  source 1..19: mol_type = other RNA
tgtgttttgcttggtcaag

SEQ ID NO: 1759 - RNA, 19 nt, synthetic construct
  source 1..19: mol_type = other RNA
gtgttttgcttggtcaaga

SEQ ID NO: 1760 - RNA, 19 nt, synthetic construct
  source 1..19: mol_type = other RNA
tgttttgcttggtcaagag

SEQ ID NO: 1761 - RNA, 19 nt, synthetic construct
  source 1..19: mol_type = other RNA
gttttgcttggtcaagagg

SEQ ID NO: 1762 - RNA, 19 nt, synthetic construct
  source 1..19: mol_type = other RNA
ttttgcttggtcaagagga

SEQ ID NO: 1763 - RNA, 19 nt, synthetic construct
  source 1..19: mol_type = other RNA
tgcttggtcaagaggaaag

SEQ ID NO: 1764 - RNA, 19 nt, synthetic construct
  source 1..19: mol_type = other RNA
ttggtcaagaggaaagaac

SEQ ID NO: 1765 - RNA, 19 nt, synthetic construct
  source 1..19: mol_type = other RNA
tggtcaagaggaaagaact

SEQ ID NO: 1766 - RNA, 19 nt, synthetic construct
  source 1..19: mol_type = other RNA
ggtcaagaggaaagaactg

SEQ ID NO: 1767 - RNA, 19 nt, synthetic construct
  source 1..19: mol_type = other RNA
agaggaaagaactggccgg

SEQ ID NO: 1768 - RNA, 19 nt, synthetic construct
  source 1..19: mol_type = other RNA
gaggaaagaactggccggg

SEQ ID NO: 1769 - RNA, 20 nt, synthetic construct
  source 1..20: mol_type = other RNA
tgcagaaatcaaatactgga

SEQ ID NO: 1770 - RNA, 20 nt, synthetic construct
  source 1..20: mol_type = other RNA
gcagaaatcaaatactggag

SEQ ID NO: 1771 - RNA, 20 nt, synthetic construct
  source 1..20: mol_type = other RNA
cagaaatcaaatactggagt

SEQ ID NO: 1772 - RNA, 20 nt, synthetic construct
  source 1..20: mol_type = other RNA
agaaatcaaatactggagtt

SEQ ID NO: 1773 - RNA, 20 nt, synthetic construct
  source 1..20: mol_type = other RNA
gaaatcaaatactggagttg

SEQ ID NO: 1774 - RNA, 20 nt, synthetic construct
  source 1..20: mol_type = other RNA
aaatcaaatactggagttgt

SEQ ID NO: 1775 - RNA, 20 nt, synthetic construct
  source 1..20: mol_type = other RNA
aatcaaatactggagttgtg

SEQ ID NO: 1776 - RNA, 20 nt, synthetic construct
  source 1..20: mol_type = other RNA
atcaaatactggagttgtgt

SEQ ID NO: 1777 - RNA, 20 nt, synthetic construct
  source 1..20: mol_type = other RNA
tcaaatactggagttgtgtt

SEQ ID NO: 1778 - RNA, 20 nt, synthetic construct
  source 1..20: mol_type = other RNA
caaatactggagttgtgttt

SEQ ID NO: 1779 - RNA, 20 nt, synthetic construct
  source 1..20: mol_type = other RNA
aaatactggagttgtgtttt

SEQ ID NO: 1780 - RNA, 20 nt, synthetic construct
  source 1..20: mol_type = other RNA
tactggagttgtgttttgct

SEQ ID NO: 1781 - RNA, 20 nt, synthetic construct
  source 1..20: mol_type = other RNA
actggagttgtgttttgctt

SEQ ID NO: 1782 - RNA, 20 nt, synthetic construct
  source 1..20: mol_type = other RNA
ctggagttgtgttttgcttg

SEQ ID NO: 1783 - RNA, 20 nt, synthetic construct
  source 1..20: mol_type = other RNA
tggagttgtgttttgcttgg

SEQ ID NO: 1784 - RNA, 20 nt, synthetic construct
  source 1..20: mol_type = other RNA
ggagttgtgttttgcttggt

SEQ ID NO: 1785 - RNA, 20 nt, synthetic construct
  source 1..20: mol_type = other RNA
gagttgtgttttgcttggtc

SEQ ID NO: 1786 - RNA, 20 nt, synthetic construct
  source 1..20: mol_type = other RNA
agttgtgttttgcttggtca

SEQ ID NO: 1787 - RNA, 20 nt, synthetic construct
  source 1..20: mol_type = other RNA
gttgtgttttgcttggtcaa

SEQ ID NO: 1788 - RNA, 20 nt, synthetic construct
  source 1..20: mol_type = other RNA
ttgtgttttgcttggtcaag

SEQ ID NO: 1789 - RNA, 20 nt, synthetic construct
  source 1..20: mol_type = other RNA
tgtgttttgcttggtcaaga

SEQ ID NO: 1790 - RNA, 20 nt, synthetic construct
  source 1..20: mol_type = other RNA
gtgttttgcttggtcaagag

SEQ ID NO: 1791 - RNA, 20 nt, synthetic construct
  source 1..20: mol_type = other RNA
tgttttgcttggtcaagagg

SEQ ID NO: 1792 - RNA, 20 nt, synthetic construct
  source 1..20: mol_type = other RNA
gttttgcttggtcaagagga

SEQ ID NO: 1793 - RNA, 20 nt, synthetic construct
  source 1..20: mol_type = other RNA
ttttgcttggtcaagaggaa

SEQ ID NO: 1794 - RNA, 20 nt, synthetic construct
  source 1..20: mol_type = other RNA
tttgcttggtcaagaggaaa

SEQ ID NO: 1795 - RNA, 20 nt, synthetic construct
  source 1..20: mol_type = other RNA
ttgcttggtcaagaggaaag

SEQ ID NO: 1796 - RNA, 20 nt, synthetic construct
  source 1..20: mol_type = other RNA
tgcttggtcaagaggaaaga

SEQ ID NO: 1797 - RNA, 20 nt, synthetic construct
  source 1..20: mol_type = other RNA
cttggtcaagaggaaagaac

SEQ ID NO: 1798 - RNA, 20 nt, synthetic construct
  source 1..20: mol_type = other RNA
ttggtcaagaggaaagaact

SEQ ID NO: 1799 - RNA, 20 nt, synthetic construct
  source 1..20: mol_type = other RNA
tggtcaagaggaaagaactg

SEQ ID NO: 1800 - RNA, 20 nt, synthetic construct
  source 1..20: mol_type = other RNA
ggtcaagaggaaagaactgg

SEQ ID NO: 1801 - RNA, 20 nt, synthetic construct
  source 1..20: mol_type = other RNA
gtcaagaggaaagaactggc

SEQ ID NO: 1802 - RNA, 20 nt, synthetic construct
  source 1..20: mol_type = other RNA
tcaagaggaaagaactggcc

SEQ ID NO: 1803 - RNA, 20 nt, synthetic construct
  source 1..20: mol_type = other RNA
caagaggaaagaactggccg

SEQ ID NO: 1804 - RNA, 20 nt, synthetic construct
  source 1..20: mol_type = other RNA
aagaggaaagaactggccgg

SEQ ID NO: 1805 - RNA, 20 nt, synthetic construct
  source 1..20: mol_type = other RNA
agaggaaagaactggccggg

SEQ ID NO: 1806 - RNA, 20 nt, synthetic construct
  source 1..20: mol_type = other RNA
gaggaaagaactggccgggc

SEQ ID NO: 1807 - RNA, 21 nt, synthetic construct
  source 1..21: mol_type = other RNA
ttgcagaaatcaaatactgga

SEQ ID NO: 1808 - RNA, 21 nt, synthetic construct
  source 1..21: mol_type = other RNA
tgcagaaatcaaatactggag

SEQ ID NO: 1809 - RNA, 21 nt, synthetic construct
  source 1..21: mol_type = other RNA
gcagaaatcaaatactggagt

SEQ ID NO: 1810 - RNA, 21 nt, synthetic construct
  source 1..21: mol_type = other RNA
cagaaatcaaatactggagtt

SEQ ID NO: 1811 - RNA, 21 nt, synthetic construct
  source 1..21: mol_type = other RNA
agaaatcaaatactggagttg

SEQ ID NO: 1812 - RNA, 21 nt, synthetic construct
  source 1..21: mol_type = other RNA
gaaatcaaatactggagttgt

SEQ ID NO: 1813 - RNA, 21 nt, synthetic construct
  source 1..21: mol_type = other RNA
aaatcaaatactggagttgtg

SEQ ID NO: 1814 - RNA, 21 nt, synthetic construct
  source 1..21: mol_type = other RNA
aatcaaatactggagttgtgt

SEQ ID NO: 1815 - RNA, 21 nt, synthetic construct
  source 1..21: mol_type = other RNA
atcaaatactggagttgtgtt

SEQ ID NO: 1816 - RNA, 21 nt, synthetic construct
  source 1..21: mol_type = other RNA
tcaaatactggagttgtgttt

SEQ ID NO: 1817 - RNA, 21 nt, synthetic construct
  source 1..21: mol_type = other RNA
caaatactggagttgtgtttt

SEQ ID NO: 1818 - RNA, 21 nt, synthetic construct
  source 1..21: mol_type = other RNA
aaatactggagttgtgttttg

SEQ ID NO: 1819 - RNA, 21 nt, synthetic construct
  source 1..21: mol_type = other RNA
aatactggagttgtgttttgc

SEQ ID NO: 1820 - RNA, 21 nt, synthetic construct
  source 1..21: mol_type = other RNA
atactggagttgtgttttgct

SEQ ID NO: 1821 - RNA, 21 nt, synthetic construct
  source 1..21: mol_type = other RNA
tactggagttgtgttttgctt

SEQ ID NO: 1822 - RNA, 21 nt, synthetic construct
  source 1..21: mol_type = other RNA
actggagttgtgttttgcttg

SEQ ID NO: 1823 - RNA, 21 nt, synthetic construct
  source 1..21: mol_type = other RNA
ctggagttgtgttttgcttgg

SEQ ID NO: 1824 - RNA, 21 nt, synthetic construct
  source 1..21: mol_type = other RNA
tggagttgtgttttgcttggt

SEQ ID NO: 1825 - RNA, 21 nt, synthetic construct
  source 1..21: mol_type = other RNA
ggagttgtgttttgcttggtc

SEQ ID NO: 1826 - RNA, 21 nt, synthetic construct
  source 1..21: mol_type = other RNA
gagttgtgttttgcttggtca

SEQ ID NO: 1827 - RNA, 21 nt, synthetic construct
  source 1..21: mol_type = other RNA
agttgtgttttgcttggtcaa

SEQ ID NO: 1828 - RNA, 21 nt, synthetic construct
  source 1..21: mol_type = other RNA
gttgtgttttgcttggtcaag

SEQ ID NO: 1829 - RNA, 21 nt, synthetic construct
  source 1..21: mol_type = other RNA
ttgtgttttgcttggtcaaga

SEQ ID NO: 1830 - RNA, 21 nt, synthetic construct
  source 1..21: mol_type = other RNA
tgtgttttgcttggtcaagag

SEQ ID NO: 1831 - RNA, 21 nt, synthetic construct
  source 1..21: mol_type = other RNA
gtgttttgcttggtcaagagg

SEQ ID NO: 1832 - RNA, 21 nt, synthetic construct
  source 1..21: mol_type = other RNA
tgttttgcttggtcaagagga

SEQ ID NO: 1833 - RNA, 21 nt, synthetic construct
  source 1..21: mol_type = other RNA
gttttgcttggtcaagaggaa

SEQ ID NO: 1834 - RNA, 21 nt, synthetic construct
  source 1..21: mol_type = other RNA
ttttgcttggtcaagaggaaa

SEQ ID NO: 1835 - RNA, 21 nt, synthetic construct
  source 1..21: mol_type = other RNA
tttgcttggtcaagaggaaag

SEQ ID NO: 1836 - RNA, 21 nt, synthetic construct
  source 1..21: mol_type = other RNA
ttgcttggtcaagaggaaaga

SEQ ID NO: 1837 - RNA, 21 nt, synthetic construct
  source 1..21: mol_type = other RNA
tgcttggtcaagaggaaagaa

SEQ ID NO: 1838 - RNA, 21 nt, synthetic construct
  source 1..21: mol_type = other RNA
gcttggtcaagaggaaagaac

SEQ ID NO: 1839 - RNA, 21 nt, synthetic construct
  source 1..21: mol_type = other RNA
cttggtcaagaggaaagaact

SEQ ID NO: 1840 - RNA, 21 nt, synthetic construct
  source 1..21: mol_type = other RNA
ttggtcaagaggaaagaactg

SEQ ID NO: 1841 - RNA, 21 nt, synthetic construct
  source 1..21: mol_type = other RNA
tggtcaagaggaaagaactgg

SEQ ID NO: 1842 - RNA, 21 nt, synthetic construct
  source 1..21: mol_type = other RNA
ggtcaagaggaaagaactggc

SEQ ID NO: 1843 - RNA, 21 nt, synthetic construct
  source 1..21: mol_type = other RNA
gtcaagaggaaagaactggcc

SEQ ID NO: 1844 - RNA, 21 nt, synthetic construct
  source 1..21: mol_type = other RNA
tcaagaggaaagaactggccg

SEQ ID NO: 1845 - RNA, 21 nt, synthetic construct
  source 1..21: mol_type = other RNA
caagaggaaagaactggccgg

SEQ ID NO: 1846 - RNA, 21 nt, synthetic construct
  source 1..21: mol_type = other RNA
aagaggaaagaactggccggg

SEQ ID NO: 1847 - RNA, 21 nt, synthetic construct
  source 1..21: mol_type = other RNA
agaggaaagaactggccgggc

SEQ ID NO: 1848 - RNA, 21 nt, synthetic construct
  source 1..21: mol_type = other RNA
gaggaaagaactggccgggcg

SEQ ID NO: 1849 - RNA, 22 nt, synthetic construct
  source 1..22: mol_type = other RNA
ttgcagaaatcaaatactggag

SEQ ID NO: 1850 - RNA, 22 nt, synthetic construct
  source 1..22: mol_type = other RNA
tgcagaaatcaaatactggagt

SEQ ID NO: 1851 - RNA, 22 nt, synthetic construct
  source 1..22: mol_type = other RNA
gcagaaatcaaatactggagtt

SEQ ID NO: 1852 - RNA, 22 nt, synthetic construct
  source 1..22: mol_type = other RNA
cagaaatcaaatactggagttg

SEQ ID NO: 1853 - RNA, 22 nt, synthetic construct
  source 1..22: mol_type = other RNA
agaaatcaaatactggagttgt

SEQ ID NO: 1854 - RNA, 22 nt, synthetic construct
  source 1..22: mol_type = other RNA
gaaatcaaatactggagttgtg

SEQ ID NO: 1855 - RNA, 22 nt, synthetic construct
  source 1..22: mol_type = other RNA
aaatcaaatactggagttgtgt

SEQ ID NO: 1856 - RNA, 22 nt, synthetic construct
  source 1..22: mol_type = other RNA
aatcaaatactggagttgtgtt

SEQ ID NO: 1857 - RNA, 22 nt, synthetic construct
  source 1..22: mol_type = other RNA
atcaaatactggagttgtgttt

SEQ ID NO: 1858 - RNA, 22 nt, synthetic construct
  source 1..22: mol_type = other RNA
tcaaatactggagttgtgtttt

SEQ ID NO: 1859 - RNA, 22 nt, synthetic construct
  source 1..22: mol_type = other RNA
caaatactggagttgtgttttg

SEQ ID NO: 1860 - RNA, 22 nt, synthetic construct
  source 1..22: mol_type = other RNA
aaatactggagttgtgttttgc

SEQ ID NO: 1861 - RNA, 22 nt, synthetic construct
  source 1..22: mol_type = other RNA
aatactggagttgtgttttgct

SEQ ID NO: 1862 - RNA, 22 nt, synthetic construct
  source 1..22: mol_type = other RNA
atactggagttgtgttttgctt

SEQ ID NO: 1863 - RNA, 22 nt, synthetic construct
  source 1..22: mol_type = other RNA
tactggagttgtgttttgcttg

SEQ ID NO: 1864 - RNA, 22 nt, synthetic construct
  source 1..22: mol_type = other RNA
actggagttgtgttttgcttgg

SEQ ID NO: 1865 - RNA, 22 nt, synthetic construct
  source 1..22: mol_type = other RNA
ctggagttgtgttttgcttggt

SEQ ID NO: 1866 - RNA, 22 nt, synthetic construct
  source 1..22: mol_type = other RNA
tggagttgtgttttgcttggtc

SEQ ID NO: 1867 - RNA, 22 nt, synthetic construct
  source 1..22: mol_type = other RNA
ggagttgtgttttgcttggtca

SEQ ID NO: 1868 - RNA, 22 nt, synthetic construct
  source 1..22: mol_type = other RNA
gagttgtgttttgcttggtcaa

SEQ ID NO: 1869 - RNA, 22 nt, synthetic construct
  source 1..22: mol_type = other RNA
agttgtgttttgcttggtcaag

SEQ ID NO: 1870 - RNA, 22 nt, synthetic construct
  source 1..22: mol_type = other RNA
gttgtgttttgcttggtcaaga

SEQ ID NO: 1871 - RNA, 22 nt, synthetic construct
  source 1..22: mol_type = other RNA
ttgtgttttgcttggtcaagag

SEQ ID NO: 1872 - RNA, 22 nt, synthetic construct
  source 1..22: mol_type = other RNA
tgtgttttgcttggtcaagagg

SEQ ID NO: 1873 - RNA, 22 nt, synthetic construct
  source 1..22: mol_type = other RNA
gtgttttgcttggtcaagagga

SEQ ID NO: 1874 - RNA, 22 nt, synthetic construct
  source 1..22: mol_type = other RNA
tgttttgcttggtcaagaggaa

SEQ ID NO: 1875 - RNA, 22 nt, synthetic construct
  source 1..22: mol_type = other RNA
gttttgcttggtcaagaggaaa

SEQ ID NO: 1876 - RNA, 22 nt, synthetic construct
  source 1..22: mol_type = other RNA
ttttgcttggtcaagaggaaag

SEQ ID NO: 1877 - RNA, 22 nt, synthetic construct
  source 1..22: mol_type = other RNA
tttgcttggtcaagaggaaaga

SEQ ID NO: 1878 - RNA, 22 nt, synthetic construct
  source 1..22: mol_type = other RNA
ttgcttggtcaagaggaaagaa

SEQ ID NO: 1879 - RNA, 22 nt, synthetic construct
  source 1..22: mol_type = other RNA
tgcttggtcaagaggaaagaac

SEQ ID NO: 1880 - RNA, 22 nt, synthetic construct
  source 1..22: mol_type = other RNA
gcttggtcaagaggaaagaact

SEQ ID NO: 1881 - RNA, 22 nt, synthetic construct
  source 1..22: mol_type = other RNA
cttggtcaagaggaaagaactg

SEQ ID NO: 1882 - RNA, 22 nt, synthetic construct
  source 1..22: mol_type = other RNA
ttggtcaagaggaaagaactgg

SEQ ID NO: 1883 - RNA, 22 nt, synthetic construct
  source 1..22: mol_type = other RNA
tggtcaagaggaaagaactggc

SEQ ID NO: 1884 - RNA, 22 nt, synthetic construct
  source 1..22: mol_type = other RNA
ggtcaagaggaaagaactggcc

SEQ ID NO: 1885 - RNA, 22 nt, synthetic construct
  source 1..22: mol_type = other RNA
gtcaagaggaaagaactggccg

SEQ ID NO: 1886 - RNA, 22 nt, synthetic construct
  source 1..22: mol_type = other RNA
tcaagaggaaagaactggccgg

SEQ ID NO: 1887 - RNA, 22 nt, synthetic construct
  source 1..22: mol_type = other RNA
caagaggaaagaactggccggg

SEQ ID NO: 1888 - RNA, 22 nt, synthetic construct
  source 1..22: mol_type = other RNA
aagaggaaagaactggccgggc

SEQ ID NO: 1889 - RNA, 22 nt, synthetic construct
  source 1..22: mol_type = other RNA
agaggaaagaactggccgggcg

SEQ ID NO: 1890 - RNA, 22 nt, synthetic construct
  source 1..22: mol_type = other RNA
gaggaaagaactggccgggcgc

SEQ ID NO: 1891 - RNA, 23 nt, synthetic construct
  source 1..23: mol_type = other RNA
ttgcagaaatcaaatactggagt

SEQ ID NO: 1892 - RNA, 23 nt, synthetic construct
  source 1..23: mol_type = other RNA
tgcagaaatcaaatactggagtt

SEQ ID NO: 1893 - RNA, 23 nt, synthetic construct
  source 1..23: mol_type = other RNA
gcagaaatcaaatactggagttg

SEQ ID NO: 1894 - RNA, 23 nt, synthetic construct
  source 1..23: mol_type = other RNA
cagaaatcaaatactggagttgt

SEQ ID NO: 1895 - RNA, 23 nt, synthetic construct
  source 1..23: mol_type = other RNA
agaaatcaaatactggagttgtg

SEQ ID NO: 1896 - RNA, 23 nt, synthetic construct
  source 1..23: mol_type = other RNA
gaaatcaaatactggagttgtgt

SEQ ID NO: 1897 - RNA, 23 nt, synthetic construct
  source 1..23: mol_type = other RNA
aaatcaaatactggagttgtgtt

SEQ ID NO: 1898 - RNA, 23 nt, synthetic construct
  source 1..23: mol_type = other RNA
aatcaaatactggagttgtgttt

SEQ ID NO: 1899 - RNA, 23 nt, synthetic construct
  source 1..23: mol_type = other RNA
atcaaatactggagttgtgtttt

SEQ ID NO: 1900 - RNA, 23 nt, synthetic construct
  source 1..23: mol_type = other RNA
tcaaatactggagttgtgttttg

SEQ ID NO: 1901 - RNA, 23 nt, synthetic construct
  source 1..23: mol_type = other RNA
caaatactggagttgtgttttgc

SEQ ID NO: 1902 - RNA, 23 nt, synthetic construct
  source 1..23: mol_type = other RNA
aaatactggagttgtgttttgct

SEQ ID NO: 1903 - RNA, 23 nt, synthetic construct
  source 1..23: mol_type = other RNA
aatactggagttgtgttttgctt

SEQ ID NO: 1904 - RNA, 23 nt, synthetic construct
  source 1..23: mol_type = other RNA
atactggagttgtgttttgcttg

SEQ ID NO: 1905 - RNA, 23 nt, synthetic construct
  source 1..23: mol_type = other RNA
tactggagttgtgttttgcttgg

SEQ ID NO: 1906 - RNA, 23 nt, synthetic construct
  source 1..23: mol_type = other RNA
actggagttgtgttttgcttggt

SEQ ID NO: 1907 - RNA, 23 nt, synthetic construct
  source 1..23: mol_type = other RNA
ctggagttgtgttttgcttggtc

SEQ ID NO: 1908 - RNA, 23 nt, synthetic construct
  source 1..23: mol_type = other RNA
tggagttgtgttttgcttggtca

SEQ ID NO: 1909 - RNA, 23 nt, synthetic construct
  source 1..23: mol_type = other RNA
ggagttgtgttttgcttggtcaa

SEQ ID NO: 1910 - RNA, 23 nt, synthetic construct
  source 1..23: mol_type = other RNA
gagttgtgttttgcttggtcaag

SEQ ID NO: 1911 - RNA, 23 nt, synthetic construct
  source 1..23: mol_type = other RNA
agttgtgttttgcttggtcaaga

SEQ ID NO: 1912 - RNA, 23 nt, synthetic construct
  source 1..23: mol_type = other RNA
gttgtgttttgcttggtcaagag

SEQ ID NO: 1913 - RNA, 23 nt, synthetic construct
  source 1..23: mol_type = other RNA
ttgtgttttgcttggtcaagagg

SEQ ID NO: 1914 - RNA, 23 nt, synthetic construct
  source 1..23: mol_type = other RNA
tgtgttttgcttggtcaagagga

SEQ ID NO: 1915 - RNA, 23 nt, synthetic construct
  source 1..23: mol_type = other RNA
gtgttttgcttggtcaagaggaa

SEQ ID NO: 1916 - RNA, 23 nt, synthetic construct
  source 1..23: mol_type = other RNA
tgttttgcttggtcaagaggaaa

SEQ ID NO: 1917 - RNA, 23 nt, synthetic construct
  source 1..23: mol_type = other RNA
gttttgcttggtcaagaggaaag

SEQ ID NO: 1918 - RNA, 23 nt, synthetic construct
  source 1..23: mol_type = other RNA
ttttgcttggtcaagaggaaaga

SEQ ID NO: 1919 - RNA, 23 nt, synthetic construct
  source 1..23: mol_type = other RNA
tttgcttggtcaagaggaaagaa

SEQ ID NO: 1920 - RNA, 23 nt, synthetic construct
  source 1..23: mol_type = other RNA
ttgcttggtcaagaggaaagaac

SEQ ID NO: 1921 - RNA, 23 nt, synthetic construct
  source 1..23: mol_type = other RNA
tgcttggtcaagaggaaagaact

SEQ ID NO: 1922 - RNA, 23 nt, synthetic construct
  source 1..23: mol_type = other RNA
gcttggtcaagaggaaagaactg

SEQ ID NO: 1923 - RNA, 23 nt, synthetic construct
  source 1..23: mol_type = other RNA
cttggtcaagaggaaagaactgg

SEQ ID NO: 1924 - RNA, 23 nt, synthetic construct
  source 1..23: mol_type = other RNA
ttggtcaagaggaaagaactggc

SEQ ID NO: 1925 - RNA, 23 nt, synthetic construct
  source 1..23: mol_type = other RNA
tggtcaagaggaaagaactggcc

SEQ ID NO: 1926 - RNA, 23 nt, synthetic construct
  source 1..23: mol_type = other RNA
ggtcaagaggaaagaactggccg

SEQ ID NO: 1927 - RNA, 23 nt, synthetic construct
  source 1..23: mol_type = other RNA
gtcaagaggaaagaactggccgg

SEQ ID NO: 1928 - RNA, 23 nt, synthetic construct
  source 1..23: mol_type = other RNA
tcaagaggaaagaactggccggg

SEQ ID NO: 1929 - RNA, 23 nt, synthetic construct
  source 1..23: mol_type = other RNA
caagaggaaagaactggccgggc

SEQ ID NO: 1930 - RNA, 23 nt, synthetic construct
  source 1..23: mol_type = other RNA
aagaggaaagaactggccgggcg

SEQ ID NO: 1931 - RNA, 23 nt, synthetic construct
  source 1..23: mol_type = other RNA
agaggaaagaactggccgggcgc

SEQ ID NO: 1932 - RNA, 23 nt, synthetic construct
  source 1..23: mol_type = other RNA
gaggaaagaactggccgggcgcg

SEQ ID NO: 1933 - RNA, 24 nt, synthetic construct
  source 1..24: mol_type = other RNA
ttgcagaaatcaaatactggagtt

SEQ ID NO: 1934 - RNA, 24 nt, synthetic construct
  source 1..24: mol_type = other RNA
tgcagaaatcaaatactggagttg

SEQ ID NO: 1935 - RNA, 24 nt, synthetic construct
  source 1..24: mol_type = other RNA
gcagaaatcaaatactggagttgt

SEQ ID NO: 1936 - RNA, 24 nt, synthetic construct
  source 1..24: mol_type = other RNA
cagaaatcaaatactggagttgtg

SEQ ID NO: 1937 - RNA, 24 nt, synthetic construct
  source 1..24: mol_type = other RNA
agaaatcaaatactggagttgtgt

SEQ ID NO: 1938 - RNA, 24 nt, synthetic construct
  source 1..24: mol_type = other RNA
gaaatcaaatactggagttgtgtt

SEQ ID NO: 1939 - RNA, 24 nt, synthetic construct
  source 1..24: mol_type = other RNA
aaatcaaatactggagttgtgttt

SEQ ID NO: 1940 - RNA, 24 nt, synthetic construct
  source 1..24: mol_type = other RNA
aatcaaatactggagttgtgtttt

SEQ ID NO: 1941 - RNA, 24 nt, synthetic construct
  source 1..24: mol_type = other RNA
atcaaatactggagttgtgttttg

SEQ ID NO: 1942 - RNA, 24 nt, synthetic construct
  source 1..24: mol_type = other RNA
tcaaatactggagttgtgttttgc

SEQ ID NO: 1943 - RNA, 24 nt, synthetic construct
  source 1..24: mol_type = other RNA
caaatactggagttgtgttttgct

SEQ ID NO: 1944 - RNA, 24 nt, synthetic construct
  source 1..24: mol_type = other RNA
aaatactggagttgtgttttgctt

SEQ ID NO: 1945 - RNA, 24 nt, synthetic construct
  source 1..24: mol_type = other RNA
aatactggagttgtgttttgcttg

SEQ ID NO: 1946 - RNA, 24 nt, synthetic construct
  source 1..24: mol_type = other RNA
atactggagttgtgttttgcttgg

SEQ ID NO: 1947 - RNA, 24 nt, synthetic construct
  source 1..24: mol_type = other RNA
tactggagttgtgttttgcttggt

SEQ ID NO: 1948 - RNA, 24 nt, synthetic construct
  source 1..24: mol_type = other RNA
actggagttgtgttttgcttggtc

SEQ ID NO: 1949 - RNA, 24 nt, synthetic construct
  source 1..24: mol_type = other RNA
ctggagttgtgttttgcttggtca

SEQ ID NO: 1950 - RNA, 24 nt, synthetic construct
  source 1..24: mol_type = other RNA
tggagttgtgttttgcttggtcaa

SEQ ID NO: 1951 - RNA, 24 nt, synthetic construct
  source 1..24: mol_type = other RNA
ggagttgtgttttgcttggtcaag

SEQ ID NO: 1952 - RNA, 24 nt, synthetic construct
  source 1..24: mol_type = other RNA
gagttgtgttttgcttggtcaaga

SEQ ID NO: 1953 - RNA, 24 nt, synthetic construct
  source 1..24: mol_type = other RNA
agttgtgttttgcttggtcaagag

SEQ ID NO: 1954 - RNA, 24 nt, synthetic construct
  source 1..24: mol_type = other RNA
gttgtgttttgcttggtcaagagg

SEQ ID NO: 1955 - RNA, 24 nt, synthetic construct
  source 1..24: mol_type = other RNA
ttgtgttttgcttggtcaagagga

SEQ ID NO: 1956 - RNA, 24 nt, synthetic construct
  source 1..24: mol_type = other RNA
tgtgttttgcttggtcaagaggaa

SEQ ID NO: 1957 - RNA, 24 nt, synthetic construct
  source 1..24: mol_type = other RNA
gtgttttgcttggtcaagaggaaa

SEQ ID NO: 1958 - RNA, 24 nt, synthetic construct
  source 1..24: mol_type = other RNA
tgttttgcttggtcaagaggaaag

SEQ ID NO: 1959 - RNA, 24 nt, synthetic construct
  source 1..24: mol_type = other RNA
gttttgcttggtcaagaggaaaga

SEQ ID NO: 1960 - RNA, 24 nt, synthetic construct
  source 1..24: mol_type = other RNA
ttttgcttggtcaagaggaaagaa

SEQ ID NO: 1961 - RNA, 24 nt, synthetic construct
  source 1..24: mol_type = other RNA
tttgcttggtcaagaggaaagaac

SEQ ID NO: 1962 - RNA, 24 nt, synthetic construct
  source 1..24: mol_type = other RNA
ttgcttggtcaagaggaaagaact

SEQ ID NO: 1963 - RNA, 24 nt, synthetic construct
  source 1..24: mol_type = other RNA
tgcttggtcaagaggaaagaactg

SEQ ID NO: 1964 - RNA, 24 nt, synthetic construct
  source 1..24: mol_type = other RNA
gcttggtcaagaggaaagaactgg

SEQ ID NO: 1965 - RNA, 24 nt, synthetic construct
  source 1..24: mol_type = other RNA
cttggtcaagaggaaagaactggc

SEQ ID NO: 1966 - RNA, 24 nt, synthetic construct
  source 1..24: mol_type = other RNA
ttggtcaagaggaaagaactggcc

SEQ ID NO: 1967 - RNA, 24 nt, synthetic construct
  source 1..24: mol_type = other RNA
tggtcaagaggaaagaactggccg

SEQ ID NO: 1968 - RNA, 24 nt, synthetic construct
  source 1..24: mol_type = other RNA
ggtcaagaggaaagaactggccgg

SEQ ID NO: 1969 - RNA, 24 nt, synthetic construct
  source 1..24: mol_type = other RNA
gtcaagaggaaagaactggccggg

SEQ ID NO: 1970 - RNA, 24 nt, synthetic construct
  source 1..24: mol_type = other RNA
tcaagaggaaagaactggccgggc

SEQ ID NO: 1971 - RNA, 24 nt, synthetic construct
  source 1..24: mol_type = other RNA
caagaggaaagaactggccgggcg

SEQ ID NO: 1972 - RNA, 24 nt, synthetic construct
  source 1..24: mol_type = other RNA
aagaggaaagaactggccgggcgc

SEQ ID NO: 1973 - RNA, 24 nt, synthetic construct
  source 1..24: mol_type = other RNA
agaggaaagaactggccgggcgcg

SEQ ID NO: 1974 - RNA, 24 nt, synthetic construct
  source 1..24: mol_type = other RNA
gaggaaagaactggccgggcgcgg

SEQ ID NO: 1975 - RNA, 25 nt, synthetic construct
  source 1..25: mol_type = other RNA
ttgcagaaatcaaatactggagttg

SEQ ID NO: 1976 - RNA, 25 nt, synthetic construct
  source 1..25: mol_type = other RNA
tgcagaaatcaaatactggagttgt

SEQ ID NO: 1977 - RNA, 25 nt, synthetic construct
  source 1..25: mol_type = other RNA
gcagaaatcaaatactggagttgtg

SEQ ID NO: 1978 - RNA, 25 nt, synthetic construct
  source 1..25: mol_type = other RNA
cagaaatcaaatactggagttgtgt

SEQ ID NO: 1979 - RNA, 25 nt, synthetic construct
  source 1..25: mol_type = other RNA
agaaatcaaatactggagttgtgtt

SEQ ID NO: 1980 - RNA, 25 nt, synthetic construct
  source 1..25: mol_type = other RNA
gaaatcaaatactggagttgtgttt

SEQ ID NO: 1981 - RNA, 25 nt, synthetic construct
  source 1..25: mol_type = other RNA
aaatcaaatactggagttgtgtttt

SEQ ID NO: 1982 - RNA, 25 nt, synthetic construct
  source 1..25: mol_type = other RNA
aatcaaatactggagttgtgttttg

SEQ ID NO: 1983 - RNA, 25 nt, synthetic construct
  source 1..25: mol_type = other RNA
atcaaatactggagttgtgttttgc

SEQ ID NO: 1984 - RNA, 25 nt, synthetic construct
  source 1..25: mol_type = other RNA
tcaaatactggagttgtgttttgct

SEQ ID NO: 1985 - RNA, 25 nt, synthetic construct
  source 1..25: mol_type = other RNA
caaatactggagttgtgttttgctt

SEQ ID NO: 1986 - RNA, 25 nt, synthetic construct
  source 1..25: mol_type = other RNA
aaatactggagttgtgttttgcttg

SEQ ID NO: 1987 - RNA, 25 nt, synthetic construct
  source 1..25: mol_type = other RNA
aatactggagttgtgttttgcttgg

SEQ ID NO: 1988 - RNA, 25 nt, synthetic construct
  source 1..25: mol_type = other RNA
atactggagttgtgttttgcttggt

SEQ ID NO: 1989 - RNA, 25 nt, synthetic construct
  source 1..25: mol_type = other RNA
tactggagttgtgttttgcttggtc

SEQ ID NO: 1990 - RNA, 25 nt, synthetic construct
  source 1..25: mol_type = other RNA
actggagttgtgttttgcttggtca

SEQ ID NO: 1991 - RNA, 25 nt, synthetic construct
  source 1..25: mol_type = other RNA
ctggagttgtgttttgcttggtcaa

SEQ ID NO: 1992 - RNA, 25 nt, synthetic construct
  source 1..25: mol_type = other RNA
tggagttgtgttttgcttggtcaag

SEQ ID NO: 1993 - RNA, 25 nt, synthetic construct
  source 1..25: mol_type = other RNA
ggagttgtgttttgcttggtcaaga

SEQ ID NO: 1994 - RNA, 25 nt, synthetic construct
  source 1..25: mol_type = other RNA
gagttgtgttttgcttggtcaagag

SEQ ID NO: 1995 - RNA, 25 nt, synthetic construct
  source 1..25: mol_type = other RNA
agttgtgttttgcttggtcaagagg

SEQ ID NO: 1996 - RNA, 25 nt, synthetic construct
  source 1..25: mol_type = other RNA
gttgtgttttgcttggtcaagagga

SEQ ID NO: 1997 - RNA, 25 nt, synthetic construct
  source 1..25: mol_type = other RNA
ttgtgttttgcttggtcaagaggaa

SEQ ID NO: 1998 - RNA, 25 nt, synthetic construct
  source 1..25: mol_type = other RNA
tgtgttttgcttggtcaagaggaaa

SEQ ID NO: 1999 - RNA, 25 nt, synthetic construct
  source 1..25: mol_type = other RNA
gtgttttgcttggtcaagaggaaag

SEQ ID NO: 2000 - RNA, 25 nt, synthetic construct
  source 1..25: mol_type = other RNA
tgttttgcttggtcaagaggaaaga

SEQ ID NO: 2001 - RNA, 25 nt, synthetic construct
  source 1..25: mol_type = other RNA
gttttgcttggtcaagaggaaagaa

SEQ ID NO: 2002 - RNA, 25 nt, synthetic construct
  source 1..25: mol_type = other RNA
ttttgcttggtcaagaggaaagaac

SEQ ID NO: 2003 - RNA, 25 nt, synthetic construct
  source 1..25: mol_type = other RNA
tttgcttggtcaagaggaaagaact

SEQ ID NO: 2004 - RNA, 25 nt, synthetic construct
  source 1..25: mol_type = other RNA
ttgcttggtcaagaggaaagaactg

SEQ ID NO: 2005 - RNA, 25 nt, synthetic construct
  source 1..25: mol_type = other RNA
tgcttggtcaagaggaaagaactgg

SEQ ID NO: 2006 - RNA, 25 nt, synthetic construct
  source 1..25: mol_type = other RNA
gcttggtcaagaggaaagaactggc

SEQ ID NO: 2007 - RNA, 25 nt, synthetic construct
  source 1..25: mol_type = other RNA
cttggtcaagaggaaagaactggcc

SEQ ID NO: 2008 - RNA, 25 nt, synthetic construct
  source 1..25: mol_type = other RNA
ttggtcaagaggaaagaactggccg

SEQ ID NO: 2009 - RNA, 25 nt, synthetic construct
  source 1..25: mol_type = other RNA
tggtcaagaggaaagaactggccgg

SEQ ID NO: 2010 - RNA, 25 nt, synthetic construct
  source 1..25: mol_type = other RNA
ggtcaagaggaaagaactggccggg

SEQ ID NO: 2011 - RNA, 25 nt, synthetic construct
  source 1..25: mol_type = other RNA
gtcaagaggaaagaactggccgggc

SEQ ID NO: 2012 - RNA, 25 nt, synthetic construct
  source 1..25: mol_type = other RNA
tcaagaggaaagaactggccgggcg

SEQ ID NO: 2013 - RNA, 25 nt, synthetic construct
  source 1..25: mol_type = other RNA
caagaggaaagaactggccgggcgc

SEQ ID NO: 2014 - RNA, 25 nt, synthetic construct
  source 1..25: mol_type = other RNA
aagaggaaagaactggccgggcgcg

SEQ ID NO: 2015 - RNA, 25 nt, synthetic construct
  source 1..25: mol_type = other RNA
agaggaaagaactggccgggcgcgg

SEQ ID NO: 2016 - RNA, 25 nt, synthetic construct
  source 1..25: mol_type = other RNA
gaggaaagaactggccgggcgcggt

SEQ ID NO: 2017 - RNA, 26 nt, synthetic construct
  source 1..26: mol_type = other RNA
ttgcagaaatcaaatactggagttgt

SEQ ID NO: 2018 - RNA, 26 nt, synthetic construct
  source 1..26: mol_type = other RNA
tgcagaaatcaaatactggagttgtg

SEQ ID NO: 2019 - RNA, 26 nt, synthetic construct
  source 1..26: mol_type = other RNA
gcagaaatcaaatactggagttgtgt

SEQ ID NO: 2020 - RNA, 26 nt, synthetic construct
  source 1..26: mol_type = other RNA
cagaaatcaaatactggagttgtgtt

SEQ ID NO: 2021 - RNA, 26 nt, synthetic construct
  source 1..26: mol_type = other RNA
agaaatcaaatactggagttgtgttt

SEQ ID NO: 2022 - RNA, 26 nt, synthetic construct
  source 1..26: mol_type = other RNA
gaaatcaaatactggagttgtgtttt

SEQ ID NO: 2023 - RNA, 26 nt, synthetic construct
  source 1..26: mol_type = other RNA
aaatcaaatactggagttgtgttttg

SEQ ID NO: 2024 - RNA, 26 nt, synthetic construct
  source 1..26: mol_type = other RNA
aatcaaatactggagttgtgttttgc

SEQ ID NO: 2025 - RNA, 26 nt, synthetic construct
  source 1..26: mol_type = other RNA
atcaaatactggagttgtgttttgct

SEQ ID NO: 2026 - RNA, 26 nt, synthetic construct
  source 1..26: mol_type = other RNA
tcaaatactggagttgtgttttgctt

SEQ ID NO: 2027 - RNA, 26 nt, synthetic construct
  source 1..26: mol_type = other RNA
caaatactggagttgtgttttgcttg

SEQ ID NO: 2028 - RNA, 26 nt, synthetic construct
  source 1..26: mol_type = other RNA
aaatactggagttgtgttttgcttgg

SEQ ID NO: 2029 - RNA, 26 nt, synthetic construct
  source 1..26: mol_type = other RNA
aatactggagttgtgttttgcttggt

SEQ ID NO: 2030 - RNA, 26 nt, synthetic construct
  source 1..26: mol_type = other RNA
atactggagttgtgttttgcttggtc

SEQ ID NO: 2031 - RNA, 26 nt, synthetic construct
  source 1..26: mol_type = other RNA
tactggagttgtgttttgcttggtca

SEQ ID NO: 2032 - RNA, 26 nt, synthetic construct
  source 1..26: mol_type = other RNA
actggagttgtgttttgcttggtcaa

SEQ ID NO: 2033 - RNA, 26 nt, synthetic construct
  source 1..26: mol_type = other RNA
ctggagttgtgttttgcttggtcaag

SEQ ID NO: 2034 - RNA, 26 nt, synthetic construct
  source 1..26: mol_type = other RNA
tggagttgtgttttgcttggtcaaga

SEQ ID NO: 2035 - RNA, 26 nt, synthetic construct
  source 1..26: mol_type = other RNA
ggagttgtgttttgcttggtcaagag

SEQ ID NO: 2036 - RNA, 26 nt, synthetic construct
  source 1..26: mol_type = other RNA
gagttgtgttttgcttggtcaagagg

SEQ ID NO: 2037 - RNA, 26 nt, synthetic construct
  source 1..26: mol_type = other RNA
agttgtgttttgcttggtcaagagga

SEQ ID NO: 2038 - RNA, 26 nt, synthetic construct
  source 1..26: mol_type = other RNA
gttgtgttttgcttggtcaagaggaa

SEQ ID NO: 2039 - RNA, 26 nt, synthetic construct
  source 1..26: mol_type = other RNA
ttgtgttttgcttggtcaagaggaaa

SEQ ID NO: 2040 - RNA, 26 nt, synthetic construct
  source 1..26: mol_type = other RNA
tgtgttttgcttggtcaagaggaaag

SEQ ID NO: 2041 - RNA, 26 nt, synthetic construct
  source 1..26: mol_type = other RNA
gtgttttgcttggtcaagaggaaaga

SEQ ID NO: 2042 - RNA, 26 nt, synthetic construct
  source 1..26: mol_type = other RNA
tgttttgcttggtcaagaggaaagaa

SEQ ID NO: 2043 - RNA, 26 nt, synthetic construct
  source 1..26: mol_type = other RNA
gttttgcttggtcaagaggaaagaac

SEQ ID NO: 2044 - RNA, 26 nt, synthetic construct
  source 1..26: mol_type = other RNA
ttttgcttggtcaagaggaaagaact

SEQ ID NO: 2045 - RNA, 26 nt, synthetic construct
  source 1..26: mol_type = other RNA
tttgcttggtcaagaggaaagaactg

SEQ ID NO: 2046 - RNA, 26 nt, synthetic construct
  source 1..26: mol_type = other RNA
ttgcttggtcaagaggaaagaactgg

SEQ ID NO: 2047 - RNA, 26 nt, synthetic construct
  source 1..26: mol_type = other RNA
tgcttggtcaagaggaaagaactggc

SEQ ID NO: 2048 - RNA, 26 nt, synthetic construct
  source 1..26: mol_type = other RNA
gcttggtcaagaggaaagaactggcc

SEQ ID NO: 2049 - RNA, 26 nt, synthetic construct
  source 1..26: mol_type = other RNA
cttggtcaagaggaaagaactggccg

SEQ ID NO: 2050 - RNA, 26 nt, synthetic construct
  source 1..26: mol_type = other RNA
ttggtcaagaggaaagaactggccgg

SEQ ID NO: 2051 - RNA, 26 nt, synthetic construct
  source 1..26: mol_type = other RNA
tggtcaagaggaaagaactggccggg

SEQ ID NO: 2052 - RNA, 26 nt, synthetic construct
  source 1..26: mol_type = other RNA
ggtcaagaggaaagaactggccgggc

SEQ ID NO: 2053 - RNA, 26 nt, synthetic construct
  source 1..26: mol_type = other RNA
gtcaagaggaaagaactggccgggcg

SEQ ID NO: 2054 - RNA, 26 nt, synthetic construct
  source 1..26: mol_type = other RNA
tcaagaggaaagaactggccgggcgc

SEQ ID NO: 2055 - RNA, 26 nt, synthetic construct
  source 1..26: mol_type = other RNA
caagaggaaagaactggccgggcgcg

SEQ ID NO: 2056 - RNA, 26 nt, synthetic construct
  source 1..26: mol_type = other RNA
aagaggaaagaactggccgggcgcgg

SEQ ID NO: 2057 - RNA, 26 nt, synthetic construct
  source 1..26: mol_type = other RNA
agaggaaagaactggccgggcgcggt

SEQ ID NO: 2058 - RNA, 20 nt, synthetic construct
  source 1..20: mol_type = other RNA
ttcttagcatatattaaatg

SEQ ID NO: 2059 - RNA, 20 nt, synthetic construct
  source 1..20: mol_type = other RNA
ctttgtttcttagcatatat

SEQ ID NO: 2060 - RNA, 20 nt, synthetic construct
  source 1..20: mol_type = other RNA
attttctttgtttcttagca

SEQ ID NO: 2061 - RNA, 20 nt, synthetic construct
  source 1..20: mol_type = other RNA
tgcctttctattttctttgt

SEQ ID NO: 2062 - RNA, 20 nt, synthetic construct
  source 1..20: mol_type = other RNA
aataatgcctttctattttc

SEQ ID NO: 2063 - RNA, 20 nt, synthetic construct
  source 1..20: mol_type = other RNA
agcatcaaccgacagtgagc

SEQ ID NO: 2064 - RNA, 20 nt, synthetic construct
  source 1..20: mol_type = other RNA
cagtgttgacacacagcatc

SEQ ID NO: 2065 - RNA, 20 nt, synthetic construct
  source 1..20: mol_type = other RNA
acccacagtgttgacacaca

SEQ ID NO: 2066 - RNA, 20 nt, synthetic construct
  source 1..20: mol_type = other RNA
gggtcacccacagtgttgac

SEQ ID NO: 2067 - RNA, 20 nt, synthetic construct
  source 1..20: mol_type = other RNA
cagactgggtcacccacagt

SEQ ID NO: 2068 - RNA, 20 nt, synthetic construct
  source 1..20: mol_type = other RNA
attcccagactgggtcaccc

SEQ ID NO: 2069 - RNA, 20 nt, synthetic construct
  source 1..20: mol_type = other RNA
tagtctattcccagactggg

SEQ ID NO: 2070 - RNA, 20 nt, synthetic construct
  source 1..20: mol_type = other RNA
ggcctcattttagtctattc

SEQ ID NO: 2071 - RNA, 20 nt, synthetic construct
  source 1..20: mol_type = other RNA
ggaagggcctcattttagtc

SEQ ID NO: 2072 - RNA, 20 nt, synthetic construct
  source 1..20: mol_type = other RNA
atagccctcagggctggaag

SEQ ID NO: 2073 - RNA, 20 nt, synthetic construct
  source 1..20: mol_type = other RNA
tatttcccttccctatcagc

SEQ ID NO: 2074 - RNA, 20 nt, synthetic construct
  source 1..20: mol_type = other RNA
cgtgtatttatttcccttcc

SEQ ID NO: 2075 - RNA, 20 nt, synthetic construct
  source 1..20: mol_type = other RNA
gggatcaccgtgtatttatt

SEQ ID NO: 2076 - RNA, 20 nt, synthetic construct
  source 1..20: mol_type = other RNA
gccaatgggatcaccgtgta

SEQ ID NO: 2077 - RNA, 20 nt, synthetic construct
  source 1..20: mol_type = other RNA
aggacttacgtggccaatgg

SEQ ID NO: 2078 - RNA, 20 nt, synthetic construct
  source 1..20: mol_type = other RNA
gaagaaaggacttacgtggc

SEQ ID NO: 2079 - RNA, 20 nt, synthetic construct
  source 1..20: mol_type = other RNA
cctctgaagaaaggacttac

SEQ ID NO: 2080 - RNA, 20 nt, synthetic construct
  source 1..20: mol_type = other RNA
tctacctcaacggtgcctct

SEQ ID NO: 2081 - RNA, 20 nt, synthetic construct
  source 1..20: mol_type = other RNA
attctttagtcctctacctc

SEQ ID NO: 2082 - RNA, 20 nt, synthetic construct
  source 1..20: mol_type = other RNA
tcctaagcaattctttagtc

SEQ ID NO: 2083 - RNA, 20 nt, synthetic construct
  source 1..20: mol_type = other RNA
agttaactttggtgttacat

SEQ ID NO: 2084 - RNA, 20 nt, synthetic construct
  source 1..20: mol_type = other RNA
ttgcagaaatcaaatactgg

SEQ ID NO: 2085 - RNA, 20 nt, synthetic construct
  source 1..20: mol_type = other RNA
gtttcattgcagaaatcaaa

SEQ ID NO: 2086 - RNA, 20 nt, synthetic construct
  source 1..20: mol_type = other RNA
gcccaagtttcattgcagaa

SEQ ID NO: 2087 - RNA, 20 nt, synthetic construct
  source 1..20: mol_type = other RNA
acaattgccataaaatgccc

SEQ ID NO: 2088 - RNA, 20 nt, synthetic construct
  source 1..20: mol_type = other RNA
ttaaaagatgctacaattgc

SEQ ID NO: 2089 - RNA, 20 nt, synthetic construct
  source 1..20: mol_type = other RNA
gtggttttaaaagatgctac

SEQ ID NO: 2090 - RNA, 20 nt, synthetic construct
  source 1..20: mol_type = other RNA
tgcccattttgtggttttaa

SEQ ID NO: 2091 - RNA, 20 nt, synthetic construct
  source 1..20: mol_type = other RNA
ggaaaatgcccattttgtgg

SEQ ID NO: 2092 - RNA, 20 nt, synthetic construct
  source 1..20: mol_type = other RNA
ctatttagggggaaaatgcc

SEQ ID NO: 2093 - RNA, 20 nt, synthetic construct
  source 1..20: mol_type = other RNA
taagaagctatttaggggga

SEQ ID NO: 2094 - RNA, 20 nt, synthetic construct
  source 1..20: mol_type = other RNA
actcctaaaaatggattaag

SEQ ID NO: 2095 - RNA, 20 nt, synthetic construct
  source 1..20: mol_type = other RNA
atattaggggatgactccta

SEQ ID NO: 2096 - RNA, 20 nt, synthetic construct
  source 1..20: mol_type = other RNA
gtgacaaatattaggggatg

SEQ ID NO: 2097 - RNA, 20 nt, synthetic construct
  source 1..20: mol_type = other RNA
agaataatggtgacaaatat

SEQ ID NO: 2098 - RNA, 20 nt, synthetic construct
  source 1..20: mol_type = other RNA
gtaccaagaataatggtgac

SEQ ID NO: 2099 - RNA, 20 nt, synthetic construct
  source 1..20: mol_type = other RNA
tcctagtaccaagaataatg

SEQ ID NO: 2100 - RNA, 20 nt, synthetic construct
  source 1..20: mol_type = other RNA
atttttgtttcctagtacca

SEQ ID NO: 2101 - RNA, 20 nt, synthetic construct
  source 1..20: mol_type = other RNA
gcaagccccttgaataattt

SEQ ID NO: 2102 - RNA, 20 nt, synthetic construct
  source 1..20: mol_type = other RNA
actccaccccactctagatt

SEQ ID NO: 2103 - RNA, 20 nt, synthetic construct
  source 1..20: mol_type = other RNA
ttctgtttacactccacccc

SEQ ID NO: 2104 - RNA, 20 nt, synthetic construct
  source 1..20: mol_type = other RNA
ggagcttctgtttacactcc

SEQ ID NO: 2105 - RNA, 20 nt, synthetic construct
  source 1..20: mol_type = other RNA
tccctgtctaggagcttctg

SEQ ID NO: 2106 - RNA, 20 nt, synthetic construct
  source 1..20: mol_type = other RNA
gttgaagcctccatttccct

SEQ ID NO: 2107 - RNA, 20 nt, synthetic construct
  source 1..20: mol_type = other RNA
ctctggttgaagcctccatt

SEQ ID NO: 2108 - RNA, 20 nt, synthetic construct
  source 1..20: mol_type = other RNA
tctgtaacactgtgattgtc

SEQ ID NO: 2109 - RNA, 20 nt, synthetic construct
  source 1..20: mol_type = other RNA
ccccctgctgtgctctgtaa

SEQ ID NO: 2110 - RNA, 20 nt, synthetic construct
  source 1..20: mol_type = other RNA
ccctcactgctcacccccct

SEQ ID NO: 2111 - RNA, 20 nt, synthetic construct
  source 1..20: mol_type = other RNA
acctcgtcccctcactgctc

SEQ ID NO: 2112 - RNA, 20 nt, synthetic construct
  source 1..20: mol_type = other RNA
tttctgtgggcaacctcgtc

SEQ ID NO: 2113 - RNA, 20 nt, synthetic construct
  source 1..20: mol_type = other RNA
gttcttttctgtgggcaacc

SEQ ID NO: 2114 - RNA, 20 nt, synthetic construct
  source 1..20: mol_type = other RNA
gtttaatagaagttcttttc

SEQ ID NO: 2115 - RNA, 20 nt, synthetic construct
  source 1..20: mol_type = other RNA
gagctgttgtttaatagaag

SEQ ID NO: 2116 - RNA, 20 nt, synthetic construct
  source 1..20: mol_type = other RNA
tttatgagctgttgtttaat

SEQ ID NO: 2117 - RNA, 20 nt, synthetic construct
  source 1..20: mol_type = other RNA
gaagtgataacttatttatg

SEQ ID NO: 2118 - RNA, 20 nt, synthetic construct
  source 1..20: mol_type = other RNA
acatttgaagtgataactta

SEQ ID NO: 2119 - RNA, 20 nt, synthetic construct
  source 1..20: mol_type = other RNA
attaaacatttgaagtgata

SEQ ID NO: 2120 - RNA, 20 nt, synthetic construct
  source 1..20: mol_type = other RNA
ggtttttattaaacatttga

SEQ ID NO: 2121 - RNA, 20 nt, synthetic construct
  source 1..20: mol_type = other RNA
agtagtggtttttattaaac

SEQ ID NO: 2122 - RNA, 20 nt, synthetic construct
  source 1..20: mol_type = other RNA
ggagttagtagtggttttta

SEQ ID NO: 2123 - RNA, 20 nt, synthetic construct
  source 1..20: mol_type = other RNA
ttaatattaggagttagtag

SEQ ID NO: 2124 - RNA, 20 nt, synthetic construct
  source 1..20: mol_type = other RNA
tacctaaaactttttaatat

SEQ ID NO: 2125 - RNA, 20 nt, synthetic construct
  source 1..20: mol_type = other RNA
tggttatacctaaaactttt

SEQ ID NO: 2126 - RNA, 20 nt, synthetic construct
  source 1..20: mol_type = other RNA
caaattatagtggttatacc

SEQ ID NO: 2127 - RNA, 20 nt, synthetic construct
  source 1..20: mol_type = other RNA
gttagagacaaattatagtg

SEQ ID NO: 2128 - RNA, 20 nt, synthetic construct
  source 1..20: mol_type = other RNA
tagagatgttagagacaaat

SEQ ID NO: 2129 - RNA, 20 nt, synthetic construct
  source 1..20: mol_type = other RNA
gagggggaatagctttttag

SEQ ID NO: 2130 - RNA, 20 nt, synthetic construct
  source 1..20: mol_type = other RNA
cattttgagggggaatagct

SEQ ID NO: 2131 - RNA, 20 nt, synthetic construct
  source 1..20: mol_type = other RNA
gtcaacattttgagggggaa

SEQ ID NO: 2132 - RNA, 20 nt, synthetic construct
  source 1..20: mol_type = other RNA
cagtatttgtcaacattttg

SEQ ID NO: 2133 - RNA, 20 nt, synthetic construct
  source 1..20: mol_type = other RNA
aaagacagtatttgtcaaca

SEQ ID NO: 2134 - RNA, 20 nt, synthetic construct
  source 1..20: mol_type = other RNA
ctgggaataaaagacagtat

SEQ ID NO: 2135 - RNA, 20 nt, synthetic construct
  source 1..20: mol_type = other RNA
tcagactgggaataaaagac

SEQ ID NO: 2136 - RNA, 20 nt, synthetic construct
  source 1..20: mol_type = other RNA
ttattcacacttcagactgg

SEQ ID NO: 2137 - RNA, 20 nt, synthetic construct
  source 1..20: mol_type = other RNA
aaatattattcacacttcag

SEQ ID NO: 2138 - RNA, 20 nt, synthetic construct
  source 1..20: mol_type = other RNA
agatcaaatattattcacac

SEQ ID NO: 2139 - RNA, 20 nt, synthetic construct
  source 1..20: mol_type = other RNA
ttgagcacagagatcaaata

SEQ ID NO: 2140 - RNA, 20 nt, synthetic construct
  source 1..20: mol_type = other RNA
ctaatggcttgagcacagag

SEQ ID NO: 2141 - RNA, 20 nt, synthetic construct
  source 1..20: mol_type = other RNA
tcacatattgctaatggctt

SEQ ID NO: 2142 - RNA, 20 nt, synthetic construct
  source 1..20: mol_type = other RNA
cagtgggagtcacatattgc

SEQ ID NO: 2143 - RNA, 20 nt, synthetic construct
  source 1..20: mol_type = other RNA
caagccagtgggagtcacat

SEQ ID NO: 2144 - RNA, 20 nt, synthetic construct
  source 1..20: mol_type = other RNA
ttaggtcacccaagccagtg

SEQ ID NO: 2145 - RNA, 20 nt, synthetic construct
  source 1..20: mol_type = other RNA
tttcagtttttaggtcaccc

SEQ ID NO: 2146 - RNA, 20 nt, synthetic construct
  source 1..20: mol_type = other RNA
tctaatttcagtttttaggt

SEQ ID NO: 2147 - RNA, 20 nt, synthetic construct
  source 1..20: mol_type = other RNA
tttgtttctaggatctaatt

SEQ ID NO: 2148 - RNA, 20 nt, synthetic construct
  source 1..20: mol_type = other RNA
gaaagtttgtttctaggatc

SEQ ID NO: 2149 - RNA, 20 nt, synthetic construct
  source 1..20: mol_type = other RNA
tagaggggagaaagtttgtt

SEQ ID NO: 2150 - RNA, 20 nt, synthetic construct
  source 1..20: mol_type = other RNA
atgtttagaggggagaaagt

SEQ ID NO: 2151 - RNA, 20 nt, synthetic construct
  source 1..20: mol_type = other RNA
atgagctgtggatgcatgtt

SEQ ID NO: 2152 - RNA, 20 nt, synthetic construct
  source 1..20: mol_type = other RNA
aaaaaatgagctgtggatgc

SEQ ID NO: 2153 - RNA, 20 nt, synthetic construct
  source 1..20: mol_type = other RNA
cccggttttcaaaaatatag

SEQ ID NO: 2154 - RNA, 20 nt, synthetic construct
  source 1..20: mol_type = other RNA
ccgtactcatttcttcattg

SEQ ID NO: 2155 - RNA, 20 nt, synthetic construct
  source 1..20: mol_type = other RNA
ccgactttatcttttctcca

SEQ ID NO: 2156 - RNA, 20 nt, synthetic construct
  source 1..20: mol_type = other RNA
gctggtttaatgcagaacta

SEQ ID NO: 2157 - RNA, 20 nt, synthetic construct
  source 1..20: mol_type = other RNA
acccttgaaagctggtttaa

SEQ ID NO: 2158 - RNA, 20 nt, synthetic construct
  source 1..20: mol_type = other RNA
caaattctacccttgaaagc

SEQ ID NO: 2159 - RNA, 20 nt, synthetic construct
  source 1..20: mol_type = other RNA
caatgatcacaaattctacc

SEQ ID NO: 2160 - RNA, 20 nt, synthetic construct
  source 1..20: mol_type = other RNA
cacagattcaatgatcacaa

SEQ ID NO: 2161 - RNA, 20 nt, synthetic construct
  source 1..20: mol_type = other RNA
gataatcacagattcaatga

SEQ ID NO: 2162 - RNA, 20 nt, synthetic construct
  source 1..20: mol_type = other RNA
gctctgataatcacagattc

SEQ ID NO: 2163 - RNA, 20 nt, synthetic construct
  source 1..20: mol_type = other RNA
ttctgtttgctctgataatc

SEQ ID NO: 2164 - RNA, 20 nt, synthetic construct
  source 1..20: mol_type = other RNA
tgaaagcacaattctgtttg

SEQ ID NO: 2165 - RNA, 20 nt, synthetic construct
  source 1..20: mol_type = other RNA
gctttgtgaaagcacaattc

SEQ ID NO: 2166 - RNA, 20 nt, synthetic construct
  source 1..20: mol_type = other RNA
acttggctttgtgaaagcac

SEQ ID NO: 2167 - RNA, 20 nt, synthetic construct
  source 1..20: mol_type = other RNA
cttcttttttaacttggctt

SEQ ID NO: 2168 - RNA, 20 nt, synthetic construct
  source 1..20: mol_type = other RNA
cagtgggcttcttttttaac

SEQ ID NO: 2169 - RNA, 20 nt, synthetic construct
  source 1..20: mol_type = other RNA
aaaaataccagtgggcttct

SEQ ID NO: 2170 - RNA, 20 nt, synthetic construct
  source 1..20: mol_type = other RNA
tgaataatctgctcaaagta

SEQ ID NO: 2171 - RNA, 20 nt, synthetic construct
  source 1..20: mol_type = other RNA
ccgaatagattgaataatct

SEQ ID NO: 2172 - RNA, 20 nt, synthetic construct
  source 1..20: mol_type = other RNA
tacaaatggccgaatagatt

SEQ ID NO: 2173 - RNA, 20 nt, synthetic construct
  source 1..20: mol_type = other RNA
gggtgtgtggtacaaatggc

SEQ ID NO: 2174 - RNA, 20 nt, synthetic construct
  source 1..20: mol_type = other RNA
tgtacatgggtgtgtggtac

SEQ ID NO: 2175 - RNA, 20 nt, synthetic construct
  source 1..20: mol_type = other RNA
ttagagagagagagagtggt

SEQ ID NO: 2176 - RNA, 20 nt, synthetic construct
  source 1..20: mol_type = other RNA
tatcaatctcttagagagag

SEQ ID NO: 2177 - RNA, 20 nt, synthetic construct
  source 1..20: mol_type = other RNA
ctatttcatgtatcaatctc

SEQ ID NO: 2178 - RNA, 20 nt, synthetic construct
  source 1..20: mol_type = other RNA
gcaatgctatttcatgtatc

SEQ ID NO: 2179 - RNA, 20 nt, synthetic construct
  source 1..20: mol_type = other RNA
ctttatagcaatgctatttc

SEQ ID NO: 2180 - RNA, 20 nt, synthetic construct
  source 1..20: mol_type = other RNA
gttgctgtcttctttatagc

SEQ ID NO: 2181 - RNA, 20 nt, synthetic construct
  source 1..20: mol_type = other RNA
ctcttggttgctgtcttctt

SEQ ID NO: 2182 - RNA, 20 nt, synthetic construct
  source 1..20: mol_type = other RNA
gtatacaatacagatgactc

SEQ ID NO: 2183 - RNA, 20 nt, synthetic construct
  source 1..20: mol_type = other RNA
acattgtatacaatacagat

SEQ ID NO: 2184 - RNA, 20 nt, synthetic construct
  source 1..20: mol_type = other RNA
gatttcacaacattgtatac

SEQ ID NO: 2185 - RNA, 20 nt, synthetic construct
  source 1..20: mol_type = other RNA
gcattaatgatttcacaaca

SEQ ID NO: 2186 - RNA, 20 nt, synthetic construct
  source 1..20: mol_type = other RNA
caggatgcattaatgatttc

SEQ ID NO: 2187 - RNA, 20 nt, synthetic construct
  source 1..20: mol_type = other RNA
agaaacttacaggatgcatt

SEQ ID NO: 2188 - RNA, 20 nt, synthetic construct
  source 1..20: mol_type = other RNA
acaatacttggatagaaact

SEQ ID NO: 2189 - RNA, 20 nt, synthetic construct
  source 1..20: mol_type = other RNA
tccagtgtaaacaacgctac

SEQ ID NO: 2190 - RNA, 20 nt, synthetic construct
  source 1..20: mol_type = other RNA
gtctcttgtccagtgtaaac

SEQ ID NO: 2191 - RNA, 20 nt, synthetic construct
  source 1..20: mol_type = other RNA
cattggtctcttgtccagtg

SEQ ID NO: 2192 - RNA, 20 nt, synthetic construct
  source 1..20: mol_type = other RNA
ggtttattaaacattggtct

SEQ ID NO: 2193 - RNA, 20 nt, synthetic construct
  source 1..20: mol_type = other RNA
gtgtttctggtttattaaac

SEQ ID NO: 2194 - RNA, 20 nt, synthetic construct
  source 1..20: mol_type = other RNA
tactttgtggagtggagtgt

SEQ ID NO: 2195 - RNA, 20 nt, synthetic construct
  source 1..20: mol_type = other RNA
ccctttaactcttactttgt

SEQ ID NO: 2196 - RNA, 20 nt, synthetic construct
  source 1..20: mol_type = other RNA
gtctctgcaaatccattccc

SEQ ID NO: 2197 - RNA, 20 nt, synthetic construct
  source 1..20: mol_type = other RNA
gtaacttatacttgtctctg

SEQ ID NO: 2198 - RNA, 20 nt, synthetic construct
  source 1..20: mol_type = other RNA
aggtaagtaacttatacttg

SEQ ID NO: 2199 - RNA, 20 nt, synthetic construct
  source 1..20: mol_type = other RNA
atattcacaggtaagtaact

SEQ ID NO: 2200 - RNA, 20 nt, synthetic construct
  source 1..20: mol_type = other RNA
ctcaaattcatattcacagg

SEQ ID NO: 2201 - RNA, 20 nt, synthetic construct
  source 1..20: mol_type = other RNA
ctctggcttcctcaaattca

SEQ ID NO: 2202 - RNA, 20 nt, synthetic construct
  source 1..20: mol_type = other RNA
atttcctctggcttcctcaa

SEQ ID NO: 2203 - RNA, 20 nt, synthetic construct
  source 1..20: mol_type = other RNA
cagtggagtccattatttcc

SEQ ID NO: 2204 - RNA, 20 nt, synthetic construct
  source 1..20: mol_type = other RNA
ctccacagtggagtccatta

SEQ ID NO: 2205 - RNA, 20 nt, synthetic construct
  source 1..20: mol_type = other RNA
cttttaactctccacagtgg

SEQ ID NO: 2206 - RNA, 20 nt, synthetic construct
  source 1..20: mol_type = other RNA
aggttgtgaaaccttttaac

SEQ ID NO: 2207 - RNA, 20 nt, synthetic construct
  source 1..20: mol_type = other RNA
gttggaaaaggttgtgaaac

SEQ ID NO: 2208 - RNA, 20 nt, synthetic construct
  source 1..20: mol_type = other RNA
atgaaaaccgaggttggaaa

SEQ ID NO: 2209 - RNA, 20 nt, synthetic construct
  source 1..20: mol_type = other RNA
ctttagaatgatgaaaaccg

SEQ ID NO: 2210 - RNA, 20 nt, synthetic construct
  source 1..20: mol_type = other RNA
aattctgttcagtgctttag

SEQ ID NO: 2211 - RNA, 20 nt, synthetic construct
  source 1..20: mol_type = other RNA
gaaaaagtttgaattctgtt

SEQ ID NO: 2212 - RNA, 20 nt, synthetic construct
  source 1..20: mol_type = other RNA
gttcttgaaaaagtttgaat

SEQ ID NO: 2213 - RNA, 20 nt, synthetic construct
  source 1..20: mol_type = other RNA
gataatgttcttgaaaaagt

SEQ ID NO: 2214 - RNA, 20 nt, synthetic construct
  source 1..20: mol_type = other RNA
cttaggcaaatagataatgt

SEQ ID NO: 2215 - RNA, 20 nt, synthetic construct
  source 1..20: mol_type = other RNA
cattgatccttaggcaaata

SEQ ID NO: 2216 - RNA, 20 nt, synthetic construct
  source 1..20: mol_type = other RNA
gcccttagggacattgatcc

SEQ ID NO: 2217 - RNA, 20 nt, synthetic construct
  source 1..20: mol_type = other RNA
ttgggctgcccttagggaca

SEQ ID NO: 2218 - RNA, 20 nt, synthetic construct
  source 1..20: mol_type = other RNA
tgtgcttgggctgcccttag

SEQ ID NO: 2219 - RNA, 20 nt, synthetic construct
  source 1..20: mol_type = other RNA
tgaactgtgcttgggctgcc

SEQ ID NO: 2220 - RNA, 20 nt, synthetic construct
  source 1..20: mol_type = other RNA
tgtgtttggggttattgctc

SEQ ID NO: 2221 - RNA, 20 nt, synthetic construct
  source 1..20: mol_type = other RNA
cactctgtgtttggggttat

SEQ ID NO: 2222 - RNA, 20 nt, synthetic construct
  source 1..20: mol_type = other RNA
cccaagcacactctgtgttt

SEQ ID NO: 2223 - RNA, 20 nt, synthetic construct
  source 1..20: mol_type = other RNA
gagggtttcccaagcacact

SEQ ID NO: 2224 - RNA, 20 nt, synthetic construct
  source 1..20: mol_type = other RNA
caccctcagagggtttccca

SEQ ID NO: 2225 - RNA, 20 nt, synthetic construct
  source 1..20: mol_type = other RNA
gttgacaccctcagagggtt

SEQ ID NO: 2226 - RNA, 20 nt, synthetic construct
  source 1..20: mol_type = other RNA
aggcctgttgacaccctcag

SEQ ID NO: 2227 - RNA, 20 nt, synthetic construct
  source 1..20: mol_type = other RNA
aatttccaaggcctgttgac

SEQ ID NO: 2228 - RNA, 20 nt, synthetic construct
  source 1..20: mol_type = other RNA
gtgaatcagcaatttccaag

SEQ ID NO: 2229 - RNA, 20 nt, synthetic construct
  source 1..20: mol_type = other RNA
cgttccaaggtgaatcagca

SEQ ID NO: 2230 - RNA, 20 nt, synthetic construct
  source 1..20: mol_type = other RNA
atttgcctctcgttccaagg

SEQ ID NO: 2231 - RNA, 20 nt, synthetic construct
  source 1..20: mol_type = other RNA
actctgctcaatttgcctct

SEQ ID NO: 2232 - RNA, 20 nt, synthetic construct
  source 1..20: mol_type = other RNA
ctgggcccactctgctcaat

SEQ ID NO: 2233 - RNA, 20 nt, synthetic construct
  source 1..20: mol_type = other RNA
tcttgctgggcccactctgc

SEQ ID NO: 2234 - RNA, 20 nt, synthetic construct
  source 1..20: mol_type = other RNA
agggctcttgctgggcccac

SEQ ID NO: 2235 - RNA, 20 nt, synthetic construct
  source 1..20: mol_type = other RNA
ctgaattccagggctcttgc

SEQ ID NO: 2236 - RNA, 20 nt, synthetic construct
  source 1..20: mol_type = other RNA
ggatagcctgaattccaggg

SEQ ID NO: 2237 - RNA, 20 nt, synthetic construct
  source 1..20: mol_type = other RNA
aaataagggttgggatagcc

SEQ ID NO: 2238 - RNA, 20 nt, synthetic construct
  source 1..20: mol_type = other RNA
aggcctgtaaaaaataaggg

SEQ ID NO: 2239 - RNA, 20 nt, synthetic construct
  source 1..20: mol_type = other RNA
actacaggcctgtaaaaaat

SEQ ID NO: 2240 - RNA, 20 nt, synthetic construct
  source 1..20: mol_type = other RNA
ttcacaactacaggcctgta

SEQ ID NO: 2241 - RNA, 20 nt, synthetic construct
  source 1..20: mol_type = other RNA
agtaacttttcacaactaca

SEQ ID NO: 2242 - RNA, 20 nt, synthetic construct
  source 1..20: mol_type = other RNA
gtttttaagtaacttttcac

SEQ ID NO: 2243 - RNA, 20 nt, synthetic construct
  source 1..20: mol_type = other RNA
cttgttatgtttttaagtaa

SEQ ID NO: 2244 - RNA, 20 nt, synthetic construct
  source 1..20: mol_type = other RNA
gagggggaaagtttaaaggt

SEQ ID NO: 2245 - RNA, 20 nt, synthetic construct
  source 1..20: mol_type = other RNA
ttatattgagggggaaagtt

SEQ ID NO: 2246 - RNA, 20 nt, synthetic construct
  source 1..20: mol_type = other RNA
tccaagagcaatcttttata

SEQ ID NO: 2247 - RNA, 20 nt, synthetic construct
  source 1..20: mol_type = other RNA
gggattttccaagagcaatc

SEQ ID NO: 2248 - RNA, 20 nt, synthetic construct
  source 1..20: mol_type = other RNA
gcaaccagggattttccaag

SEQ ID NO: 2249 - RNA, 20 nt, synthetic construct
  source 1..20: mol_type = other RNA
atcctgcaaccagggatttt

SEQ ID NO: 2250 - RNA, 20 nt, synthetic construct
  source 1..20: mol_type = other RNA
tctggatcctgcaaccaggg

SEQ ID NO: 2251 - RNA, 20 nt, synthetic construct
  source 1..20: mol_type = other RNA
ggccaggagcatctggatcc

SEQ ID NO: 2252 - RNA, 20 nt, synthetic construct
  source 1..20: mol_type = other RNA
agctgggccaggagcatctg

SEQ ID NO: 2253 - RNA, 20 nt, synthetic construct
  source 1..20: mol_type = other RNA
tctatagctgggccaggagc

SEQ ID NO: 2254 - RNA, 20 nt, synthetic construct
  source 1..20: mol_type = other RNA
caaaactctatagctgggcc

SEQ ID NO: 2255 - RNA, 20 nt, synthetic construct
  source 1..20: mol_type = other RNA
gctgtttcaaatgttctttt

SEQ ID NO: 2256 - RNA, 20 nt, synthetic construct
  source 1..20: mol_type = other RNA
tttgagcaaggctgtttcaa

SEQ ID NO: 2257 - RNA, 20 nt, synthetic construct
  source 1..20: mol_type = other RNA
ctcagacttttgagcaaggc

SEQ ID NO: 2258 - RNA, 20 nt, synthetic construct
  source 1..20: mol_type = other RNA
gtgcactcagacttttgagc

SEQ ID NO: 2259 - RNA, 20 nt, synthetic construct
  source 1..20: mol_type = other RNA
agttgtctgtgcactcagac

SEQ ID NO: 2260 - RNA, 20 nt, synthetic construct
  source 1..20: mol_type = other RNA
ggtgcaagagttgtctgtgc

SEQ ID NO: 2261 - RNA, 20 nt, synthetic construct
  source 1..20: mol_type = other RNA
gtccatgccagggtgcaaga

SEQ ID NO: 2262 - RNA, 20 nt, synthetic construct
  source 1..20: mol_type = other RNA
tcatctggtgtgtccatgcc

SEQ ID NO: 2263 - RNA, 20 nt, synthetic construct
  source 1..20: mol_type = other RNA
atacagagcttcatctggtg

SEQ ID NO: 2264 - RNA, 20 nt, synthetic construct
  source 1..20: mol_type = other RNA
catctttgcttatacagagc

SEQ ID NO: 2265 - RNA, 20 nt, synthetic construct
  source 1..20: mol_type = other RNA
agaaaatcgttcatctttgc

SEQ ID NO: 2266 - RNA, 20 nt, synthetic construct
  source 1..20: mol_type = other RNA
acctttagaaaatcgttcat

SEQ ID NO: 2267 - RNA, 20 nt, synthetic construct
  source 1..20: mol_type = other RNA
gacctgttcatttgaacctt

SEQ ID NO: 2268 - RNA, 20 nt, synthetic construct
  source 1..20: mol_type = other RNA
atttgactcaagacctgttc

SEQ ID NO: 2269 - RNA, 20 nt, synthetic construct
  source 1..20: mol_type = other RNA
gctccacatgcttatttgac

SEQ ID NO: 2270 - RNA, 20 nt, synthetic construct
  source 1..20: mol_type = other RNA
gaggagctccacatgcttat

SEQ ID NO: 2271 - RNA, 20 nt, synthetic construct
  source 1..20: mol_type = other RNA
tattggaggagctccacatg

SEQ ID NO: 2272 - RNA, 20 nt, synthetic construct
  source 1..20: mol_type = other RNA
caaatatattggaggagctc

SEQ ID NO: 2273 - RNA, 20 nt, synthetic construct
  source 1..20: mol_type = other RNA
gaggcagcacaaatatattg

SEQ ID NO: 2274 - RNA, 20 nt, synthetic construct
  source 1..20: mol_type = other RNA
tggaaagattcacaagaagg

SEQ ID NO: 2275 - RNA, 20 nt, synthetic construct
  source 1..20: mol_type = other RNA
ggaaaaatggaaagattcac

SEQ ID NO: 2276 - RNA, 20 nt, synthetic construct
  source 1..20: mol_type = other RNA
acattgtaggaaaaatggaa

SEQ ID NO: 2277 - RNA, 20 nt, synthetic construct
  source 1..20: mol_type = other RNA
aaaaataagaacattgtagg

SEQ ID NO: 2278 - RNA, 20 nt, synthetic construct
  source 1..20: mol_type = other RNA
gctcaggcaaaggagaaaaa

SEQ ID NO: 2279 - RNA, 20 nt, synthetic construct
  source 1..20: mol_type = other RNA
tttagggaaaagtaagctca

SEQ ID NO: 2280 - RNA, 20 nt, synthetic construct
  source 1..20: mol_type = other RNA
gaggcatttagggaaaagta

SEQ ID NO: 2281 - RNA, 20 nt, synthetic construct
  source 1..20: mol_type = other RNA
gcctattattattcattgct

SEQ ID NO: 2282 - RNA, 20 nt, synthetic construct
  source 1..20: mol_type = other RNA
atgttgcctattattattca

SEQ ID NO: 2283 - RNA, 20 nt, synthetic construct
  source 1..20: mol_type = other RNA
gtcttgaccaatgttgccta

SEQ ID NO: 2284 - RNA, 20 nt, synthetic construct
  source 1..20: mol_type = other RNA
ccaaccaagtcttgaccaat

SEQ ID NO: 2285 - RNA, 20 nt, synthetic construct
  source 1..20: mol_type = other RNA
ccaggcacccaaccaagtct

SEQ ID NO: 2286 - RNA, 20 nt, synthetic construct
  source 1..20: mol_type = other RNA
aagtgggccaggcacccaac

SEQ ID NO: 2287 - RNA, 20 nt, synthetic construct
  source 1..20: mol_type = other RNA
tttttgaagtgggccaggca

SEQ ID NO: 2288 - RNA, 20 nt, synthetic construct
  source 1..20: mol_type = other RNA
taacatttttgaagtgggcc

SEQ ID NO: 2289 - RNA, 20 nt, synthetic construct
  source 1..20: mol_type = other RNA
gaggtgatacaaataacatt

SEQ ID NO: 2290 - RNA, 20 nt, synthetic construct
  source 1..20: mol_type = other RNA
tagggctgttgagaggccca

SEQ ID NO: 2291 - RNA, 20 nt, synthetic construct
  source 1..20: mol_type = other RNA
actcctagggctgttgagag

SEQ ID NO: 2292 - RNA, 20 nt, synthetic construct
  source 1..20: mol_type = other RNA
cacccaactcctagggctgt

SEQ ID NO: 2293 - RNA, 20 nt, synthetic construct
  source 1..20: mol_type = other RNA
tagaaatgacatgatagcac

SEQ ID NO: 2294 - RNA, 20 nt, synthetic construct
  source 1..20: mol_type = other RNA
cccaactataaaatagaaat

SEQ ID NO: 2295 - RNA, 20 nt, synthetic construct
  source 1..20: mol_type = other RNA
acatctactagttgttacac

SEQ ID NO: 2296 - RNA, 20 nt, synthetic construct
  source 1..20: mol_type = other RNA
gcatgtggcttcacatctac

SEQ ID NO: 2297 - RNA, 20 nt, synthetic construct
  source 1..20: mol_type = other RNA
tagcacagactggcatgtgg

SEQ ID NO: 2298 - RNA, 20 nt, synthetic construct
  source 1..20: mol_type = other RNA
gaaggttagcacagactggc

SEQ ID NO: 2299 - RNA, 20 nt, synthetic construct
  source 1..20: mol_type = other RNA
gagtggaagaaggttagcac

SEQ ID NO: 2300 - RNA, 20 nt, synthetic construct
  source 1..20: mol_type = other RNA
tcagagcacagagtggaaga

SEQ ID NO: 2301 - RNA, 20 nt, synthetic construct
  source 1..20: mol_type = other RNA
caattgcatttcagagcaca

SEQ ID NO: 2302 - RNA, 20 nt, synthetic construct
  source 1..20: mol_type = other RNA
gcccatcaattgcatttcag

SEQ ID NO: 2303 - RNA, 20 nt, synthetic construct
  source 1..20: mol_type = other RNA
aatttctgcaaattaagaag

SEQ ID NO: 2304 - RNA, 20 nt, synthetic construct
  source 1..20: mol_type = other RNA
acagtttaatttctgcaaat

SEQ ID NO: 2305 - RNA, 20 nt, synthetic construct
  source 1..20: mol_type = other RNA
atttgatcttacagtttaat

SEQ ID NO: 2306 - RNA, 20 nt, synthetic construct
  source 1..20: mol_type = other RNA
gagaaaatttgatcttacag

SEQ ID NO: 2307 - RNA, 20 nt, synthetic construct
  source 1..20: mol_type = other RNA
ttatgacagagaaacctaaa

SEQ ID NO: 2308 - RNA, 20 nt, synthetic construct
  source 1..20: mol_type = other RNA
ataaaaaatttatgacagag

SEQ ID NO: 2309 - RNA, 20 nt, synthetic construct
  source 1..20: mol_type = other RNA
caatgttgcctgtgtgcact

SEQ ID NO: 2310 - RNA, 20 nt, synthetic construct
  source 1..20: mol_type = other RNA
gtcctttcaatgttgcctgt

SEQ ID NO: 2311 - RNA, 20 nt, synthetic construct
  source 1..20: mol_type = other RNA
gccatcttggtcctttcaat

SEQ ID NO: 2312 - RNA, 20 nt, synthetic construct
  source 1..20: mol_type = other RNA
tcagcagccatcttggtcct

SEQ ID NO: 2313 - RNA, 20 nt, synthetic construct
  source 1..20: mol_type = other RNA
ttctctcagcagccatcttg

SEQ ID NO: 2314 - RNA, 20 nt, synthetic construct
  source 1..20: mol_type = other RNA
gcctcttctctcagcagcca

SEQ ID NO: 2315 - RNA, 20 nt, synthetic construct
  source 1..20: mol_type = other RNA
tttttgcctcttctctcagc

SEQ ID NO: 2316 - RNA, 20 nt, synthetic construct
  source 1..20: mol_type = other RNA
tacaagccactttttgcctc

SEQ ID NO: 2317 - RNA, 20 nt, synthetic construct
  source 1..20: mol_type = other RNA
aagcaaatttacaagccact

SEQ ID NO: 2318 - RNA, 20 nt, synthetic construct
  source 1..20: mol_type = other RNA
cctacttaagcaaatttaca

SEQ ID NO: 2319 - RNA, 20 nt, synthetic construct
  source 1..20: mol_type = other RNA
cttcacctacttaagcaaat

SEQ ID NO: 2320 - RNA, 20 nt, synthetic construct
  source 1..20: mol_type = other RNA
gtctttcttcacctacttaa

SEQ ID NO: 2321 - RNA, 20 nt, synthetic construct
  source 1..20: mol_type = other RNA
tctttgtctttcttcaccta

SEQ ID NO: 2322 - RNA, 20 nt, synthetic construct
  source 1..20: mol_type = other RNA
gcactgaaagcccttctttg

SEQ ID NO: 2323 - RNA, 20 nt, synthetic construct
  source 1..20: mol_type = other RNA
ctactggcactgaaagccct

SEQ ID NO: 2324 - RNA, 20 nt, synthetic construct
  source 1..20: mol_type = other RNA
tcatcctactggcactgaaa

SEQ ID NO: 2325 - RNA, 20 nt, synthetic construct
  source 1..20: mol_type = other RNA
gcaactcatcctactggcac

SEQ ID NO: 2326 - RNA, 20 nt, synthetic construct
  source 1..20: mol_type = other RNA
actgcatgcaactcatccta

SEQ ID NO: 2327 - RNA, 20 nt, synthetic construct
  source 1..20: mol_type = other RNA
tatcttagactgcatgcaac

SEQ ID NO: 2328 - RNA, 20 nt, synthetic construct
  source 1..20: mol_type = other RNA
gttcttatcttagactgcat

SEQ ID NO: 2329 - RNA, 20 nt, synthetic construct
  source 1..20: mol_type = other RNA
cagaagttcttatcttagac

SEQ ID NO: 2330 - RNA, 20 nt, synthetic construct
  source 1..20: mol_type = other RNA
cgtgaacagaagttcttatc

SEQ ID NO: 2331 - RNA, 20 nt, synthetic construct
  source 1..20: mol_type = other RNA
ggtggccgtgaacagaagtt

SEQ ID NO: 2332 - RNA, 20 nt, synthetic construct
  source 1..20: mol_type = other RNA
ccctgggtggccgtgaacag

SEQ ID NO: 2333 - RNA, 20 nt, synthetic construct
  source 1..20: mol_type = other RNA
aacactggccctgggtggcc

SEQ ID NO: 2334 - RNA, 20 nt, synthetic construct
  source 1..20: mol_type = other RNA
ttgtaaacactggccctggg

SEQ ID NO: 2335 - RNA, 20 nt, synthetic construct
  source 1..20: mol_type = other RNA
gctcagctttgtaaacactg

SEQ ID NO: 2336 - RNA, 20 nt, synthetic construct
  source 1..20: mol_type = other RNA
cttcttgtggctcagctttg

SEQ ID NO: 2337 - RNA, 20 nt, synthetic construct
  source 1..20: mol_type = other RNA
cccatccttcttgtggctca

SEQ ID NO: 2338 - RNA, 20 nt, synthetic construct
  source 1..20: mol_type = other RNA
cctaacccatccttcttgtg

SEQ ID NO: 2339 - RNA, 20 nt, synthetic construct
  source 1..20: mol_type = other RNA
ttcctgcctaacccatcctt

SEQ ID NO: 2340 - RNA, 20 nt, synthetic construct
  source 1..20: mol_type = other RNA
caagacttcctgcctaaccc

SEQ ID NO: 2341 - RNA, 20 nt, synthetic construct
  source 1..20: mol_type = other RNA
gcatgtgcaagacttcctgc

SEQ ID NO: 2342 - RNA, 20 nt, synthetic construct
  source 1..20: mol_type = other RNA
ttggtgtgcatgtgcaagac

SEQ ID NO: 2343 - RNA, 20 nt, synthetic construct
  source 1..20: mol_type = other RNA
tgtgattggtgtgcatgtgc

SEQ ID NO: 2344 - RNA, 20 nt, synthetic construct
  source 1..20: mol_type = other RNA
gcttctgtgattggtgtgca

SEQ ID NO: 2345 - RNA, 20 nt, synthetic construct
  source 1..20: mol_type = other RNA
taaccagcttctgtgattgg

SEQ ID NO: 2346 - RNA, 20 nt, synthetic construct
  source 1..20: mol_type = other RNA
gtggtaataaccagcttctg

SEQ ID NO: 2347 - RNA, 20 nt, synthetic construct
  source 1..20: mol_type = other RNA
tcagggtggtaataaccagc

SEQ ID NO: 2348 - RNA, 20 nt, synthetic construct
  source 1..20: mol_type = other RNA
gattttcagggtggtaataa

SEQ ID NO: 2349 - RNA, 20 nt, synthetic construct
  source 1..20: mol_type = other RNA
tatattgattttcagggtgg

SEQ ID NO: 2350 - RNA, 20 nt, synthetic construct
  source 1..20: mol_type = other RNA
caatttatattgattttcag

SEQ ID NO: 2351 - RNA, 20 nt, synthetic construct
  source 1..20: mol_type = other RNA
ctttacacaatttatattga

SEQ ID NO: 2352 - RNA, 20 nt, synthetic construct
  source 1..20: mol_type = other RNA
gctggctttacacaatttat

SEQ ID NO: 2353 - RNA, 20 nt, synthetic construct
  source 1..20: mol_type = other RNA
gactcatgctggctttacac

SEQ ID NO: 2354 - RNA, 20 nt, synthetic construct
  source 1..20: mol_type = other RNA
gttaactgactcatgctggc

SEQ ID NO: 2355 - RNA, 20 nt, synthetic construct
  source 1..20: mol_type = other RNA
tatattgtgttaactgactc

SEQ ID NO: 2356 - RNA, 20 nt, synthetic construct
  source 1..20: mol_type = other RNA
gccaattatattgtgttaac

SEQ ID NO: 2357 - RNA, 20 nt, synthetic construct
  source 1..20: mol_type = other RNA
acatagccaattatattgtg

SEQ ID NO: 2358 - RNA, 20 nt, synthetic construct
  source 1..20: mol_type = other RNA
caaaaaaacatagccaatta

SEQ ID NO: 2359 - RNA, 20 nt, synthetic construct
  source 1..20: mol_type = other RNA
tgccacaaaaaaacatagcc

SEQ ID NO: 2360 - RNA, 20 nt, synthetic construct
  source 1..20: mol_type = other RNA
tgctagtctctatgccacaa

SEQ ID NO: 2361 - RNA, 20 nt, synthetic construct
  source 1..20: mol_type = other RNA
tctctctgctagtctctatg

SEQ ID NO: 2362 - RNA, 20 nt, synthetic construct
  source 1..20: mol_type = other RNA
gacatttttctctctgctag

SEQ ID NO: 2363 - RNA, 20 nt, synthetic construct
  source 1..20: mol_type = other RNA
tctaatttagacatttttct

SEQ ID NO: 2364 - RNA, 20 nt, synthetic construct
  source 1..20: mol_type = other RNA
gaaagctctaatttagacat

SEQ ID NO: 2365 - RNA, 20 nt, synthetic construct
  source 1..20: mol_type = other RNA
gctacctaagaaagctctaa

SEQ ID NO: 2366 - RNA, 20 nt, synthetic construct
  source 1..20: mol_type = other RNA
aatacataagctacctaaga

SEQ ID NO: 2367 - RNA, 20 nt, synthetic construct
  source 1..20: mol_type = other RNA
cacagcttgctttaaaaata

SEQ ID NO: 2368 - RNA, 20 nt, synthetic construct
  source 1..20: mol_type = other RNA
cttccacacagcttgcttta

SEQ ID NO: 2369 - RNA, 20 nt, synthetic construct
  source 1..20: mol_type = other RNA
gtgtccttccacacagcttg

SEQ ID NO: 2370 - RNA, 20 nt, synthetic construct
  source 1..20: mol_type = other RNA
gaaattgtgtccttccacac

SEQ ID NO: 2371 - RNA, 20 nt, synthetic construct
  source 1..20: mol_type = other RNA
aaactacagaaattgtgtcc

SEQ ID NO: 2372 - RNA, 20 nt, synthetic construct
  source 1..20: mol_type = other RNA
tgcagtcaactaaactacag

SEQ ID NO: 2373 - RNA, 20 nt, synthetic construct
  source 1..20: mol_type = other RNA
ccctctgcagtcaactaaac

SEQ ID NO: 2374 - RNA, 20 nt, synthetic construct
  source 1..20: mol_type = other RNA
tgcctccctctgcagtcaac

SEQ ID NO: 2375 - RNA, 20 nt, synthetic construct
  source 1..20: mol_type = other RNA
taccattctgcctccctctg

SEQ ID NO: 2376 - RNA, 20 nt, synthetic construct
  source 1..20: mol_type = other RNA
cacaagcctgtgctcttttc

SEQ ID NO: 2377 - RNA, 20 nt, synthetic construct
  source 1..20: mol_type = other RNA
gtgacttcacaagcctgtgc

SEQ ID NO: 2378 - RNA, 20 nt, synthetic construct
  source 1..20: mol_type = other RNA
ttctttgtgacttcacaagc

SEQ ID NO: 2379 - RNA, 20 nt, synthetic construct
  source 1..20: mol_type = other RNA
gccagttctttgtgacttca

SEQ ID NO: 2380 - RNA, 20 nt, synthetic construct
  source 1..20: mol_type = other RNA
tctaaagccagttctttgtg

SEQ ID NO: 2381 - RNA, 20 nt, synthetic construct
  source 1..20: mol_type = other RNA
ccaggatctaaagccagttc

SEQ ID NO: 2382 - RNA, 20 nt, synthetic construct
  source 1..20: mol_type = other RNA
aatcatccaacaagtaagtg

SEQ ID NO: 2383 - RNA, 20 nt, synthetic construct
  source 1..20: mol_type = other RNA
taaccaaatcatccaacaag

SEQ ID NO: 2384 - RNA, 20 nt, synthetic construct
  source 1..20: mol_type = other RNA
atcactaccttaaccaaatc

SEQ ID NO: 2385 - RNA, 20 nt, synthetic construct
  source 1..20: mol_type = other RNA
gcaagtatcactaccttaac

SEQ ID NO: 2386 - RNA, 20 nt, synthetic construct
  source 1..20: mol_type = other RNA
aattagcaagtatcactacc

SEQ ID NO: 2387 - RNA, 20 nt, synthetic construct
  source 1..20: mol_type = other RNA
catgaggggaaataattagc

SEQ ID NO: 2388 - RNA, 20 nt, synthetic construct
  source 1..20: mol_type = other RNA
acttcacatgaggggaaata

SEQ ID NO: 2389 - RNA, 20 nt, synthetic construct
  source 1..20: mol_type = other RNA
actggacttcacatgagggg

SEQ ID NO: 2390 - RNA, 20 nt, synthetic construct
  source 1..20: mol_type = other RNA
ggcctactggacttcacatg

SEQ ID NO: 2391 - RNA, 20 nt, synthetic construct
  source 1..20: mol_type = other RNA
ttcaaggcctactggacttc

SEQ ID NO: 2392 - RNA, 20 nt, synthetic construct
  source 1..20: mol_type = other RNA
cccttattcaaggcctactg

SEQ ID NO: 2393 - RNA, 20 nt, synthetic construct
  source 1..20: mol_type = other RNA
gatttccccttattcaaggc

SEQ ID NO: 2394 - RNA, 20 nt, synthetic construct
  source 1..20: mol_type = other RNA
acaccgatttccccttattc

SEQ ID NO: 2395 - RNA, 20 nt, synthetic construct
  source 1..20: mol_type = other RNA
ttgcccaacaccgatttccc

SEQ ID NO: 2396 - RNA, 20 nt, synthetic construct
  source 1..20: mol_type = other RNA
gcacctttgcccaacaccga

SEQ ID NO: 2397 - RNA, 20 nt, synthetic construct
  source 1..20: mol_type = other RNA
gcagagcacctttgcccaac

SEQ ID NO: 2398 - RNA, 20 nt, synthetic construct
  source 1..20: mol_type = other RNA
catggagcagagcacctttg

SEQ ID NO: 2399 - RNA, 20 nt, synthetic construct
  source 1..20: mol_type = other RNA
tggtagagcttctgtcagcc

SEQ ID NO: 2400 - RNA, 20 nt, synthetic construct
  source 1..20: mol_type = other RNA
gttgaggatggtagagcttc

SEQ ID NO: 2401 - RNA, 20 nt, synthetic construct
  source 1..20: mol_type = other RNA
ttaaaagccacatgttgagg

SEQ ID NO: 2402 - RNA, 20 nt, synthetic construct
  source 1..20: mol_type = other RNA
ccaaggagaccttaaaagcc

SEQ ID NO: 2403 - RNA, 20 nt, synthetic construct
  source 1..20: mol_type = other RNA
catgtccaaggagaccttaa

SEQ ID NO: 2404 - RNA, 20 nt, synthetic construct
  source 1..20: mol_type = other RNA
atgtccatgtccaaggagac

SEQ ID NO: 2405 - RNA, 20 nt, synthetic construct
  source 1..20: mol_type = other RNA
gatacatgtccatgtccaag

SEQ ID NO: 2406 - RNA, 20 nt, synthetic construct
  source 1..20: mol_type = other RNA
gtgtgatggatacatgtcca

SEQ ID NO: 2407 - RNA, 20 nt, synthetic construct
  source 1..20: mol_type = other RNA
ctcttccctgtgtgatggat

SEQ ID NO: 2408 - RNA, 20 nt, synthetic construct
  source 1..20: mol_type = other RNA
ctccatattttctcttccct

SEQ ID NO: 2409 - RNA, 20 nt, synthetic construct
  source 1..20: mol_type = other RNA
acaaaatgctccatattttc

SEQ ID NO: 2410 - RNA, 20 nt, synthetic construct
  source 1..20: mol_type = other RNA
tccatacaaaatgctccata

SEQ ID NO: 2411 - RNA, 20 nt, synthetic construct
  source 1..20: mol_type = other RNA
gaactttccatacaaaatgc

SEQ ID NO: 2412 - RNA, 20 nt, synthetic construct
  source 1..20: mol_type = other RNA
cccacaggaactttccatac

SEQ ID NO: 2413 - RNA, 20 nt, synthetic construct
  source 1..20: mol_type = other RNA
gattggcccacaggaacttt

SEQ ID NO: 2414 - RNA, 20 nt, synthetic construct
  source 1..20: mol_type = other RNA
ttccaggattggcccacagg

SEQ ID NO: 2415 - RNA, 20 nt, synthetic construct
  source 1..20: mol_type = other RNA
gatgccacttccaggattgg

SEQ ID NO: 2416 - RNA, 20 nt, synthetic construct
  source 1..20: mol_type = other RNA
gagtagaagtaatggatgcc

SEQ ID NO: 2417 - RNA, 20 nt, synthetic construct
  source 1..20: mol_type = other RNA
aatctgagtagaagtaatgg

SEQ ID NO: 2418 - RNA, 20 nt, synthetic construct
  source 1..20: mol_type = other RNA
ctccagtggaatctgagtag

SEQ ID NO: 2419 - RNA, 20 nt, synthetic construct
  source 1..20: mol_type = other RNA
cagtcctctccagtggaatc

SEQ ID NO: 2420 - RNA, 20 nt, synthetic construct
  source 1..20: mol_type = other RNA
gtggcacagtcctctccagt

SEQ ID NO: 2421 - RNA, 20 nt, synthetic construct
  source 1..20: mol_type = other RNA
ggttatgtggcacagtcctc

SEQ ID NO: 2422 - RNA, 20 nt, synthetic construct
  source 1..20: mol_type = other RNA
ttaggtgtggttatgtggca

SEQ ID NO: 2423 - RNA, 20 nt, synthetic construct
  source 1..20: mol_type = other RNA
tcttgcagttaggtgtggtt

SEQ ID NO: 2424 - RNA, 20 nt, synthetic construct
  source 1..20: mol_type = other RNA
tccaatctttcttgcagtta

SEQ ID NO: 2425 - RNA, 20 nt, synthetic construct
  source 1..20: mol_type = other RNA
tgaccttatcttccaatctt

SEQ ID NO: 2426 - RNA, 20 nt, synthetic construct
  source 1..20: mol_type = other RNA
acagcctgaccttatcttcc

SEQ ID NO: 2427 - RNA, 20 nt, synthetic construct
  source 1..20: mol_type = other RNA
ccagacacacagcctgacct

SEQ ID NO: 2428 - RNA, 20 nt, synthetic construct
  source 1..20: mol_type = other RNA
aaacctcccagacacacagc

SEQ ID NO: 2429 - RNA, 20 nt, synthetic construct
  source 1..20: mol_type = other RNA
tttaactaaacctcccagac

SEQ ID NO: 2430 - RNA, 20 nt, synthetic construct
  source 1..20: mol_type = other RNA
ggttaacttttaactaaacc

SEQ ID NO: 2431 - RNA, 20 nt, synthetic construct
  source 1..20: mol_type = other RNA
gagattggttaacttttaac

SEQ ID NO: 2432 - RNA, 20 nt, synthetic construct
  source 1..20: mol_type = other RNA
catctcttgagattggttaa

SEQ ID NO: 2433 - RNA, 20 nt, synthetic construct
  source 1..20: mol_type = other RNA
aagaccatctcttgagattg

SEQ ID NO: 2434 - RNA, 20 nt, synthetic construct
  source 1..20: mol_type = other RNA
gtgatttcaaagaccatctc

SEQ ID NO: 2435 - RNA, 20 nt, synthetic construct
  source 1..20: mol_type = other RNA
gtgaacacaaacctttgtga

SEQ ID NO: 2436 - RNA, 20 nt, synthetic construct
  source 1..20: mol_type = other RNA
ctagtaagtgaacacaaacc

SEQ ID NO: 2437 - RNA, 20 nt, synthetic construct
  source 1..20: mol_type = other RNA
gatagctagtaagtgaacac

SEQ ID NO: 2438 - RNA, 20 nt, synthetic construct
  source 1..20: mol_type = other RNA
gctaatggagattaagtaac

SEQ ID NO: 2439 - RNA, 20 nt, synthetic construct
  source 1..20: mol_type = other RNA
ctgaggctaatggagattaa

SEQ ID NO: 2440 - RNA, 20 nt, synthetic construct
  source 1..20: mol_type = other RNA
ggtggtattctcactcccat

SEQ ID NO: 2441 - RNA, 20 nt, synthetic construct
  source 1..20: mol_type = other RNA
ctgtgcaggtggtattctca

SEQ ID NO: 2442 - RNA, 20 nt, synthetic construct
  source 1..20: mol_type = other RNA
atcatcctgtgcaggtggta

SEQ ID NO: 2443 - RNA, 20 nt, synthetic construct
  source 1..20: mol_type = other RNA
aggcctcatcatcctgtgca

SEQ ID NO: 2444 - RNA, 20 nt, synthetic construct
  source 1..20: mol_type = other RNA
aagttcaggcaggcctcatc

SEQ ID NO: 2445 - RNA, 20 nt, synthetic construct
  source 1..20: mol_type = other RNA
ggcacagggaagttcaggca

SEQ ID NO: 2446 - RNA, 20 nt, synthetic construct
  source 1..20: mol_type = other RNA
tctatggcacagggaagttc

SEQ ID NO: 2447 - RNA, 20 nt, synthetic construct
  source 1..20: mol_type = other RNA
cccaatccagaatctatggc

SEQ ID NO: 2448 - RNA, 20 nt, synthetic construct
  source 1..20: mol_type = other RNA
ggaggaactcccaatccaga

SEQ ID NO: 2449 - RNA, 20 nt, synthetic construct
  source 1..20: mol_type = other RNA
ttgggggaggaactcccaat

SEQ ID NO: 2450 - RNA, 20 nt, synthetic construct
  source 1..20: mol_type = other RNA
gctacttgggggaggaactc

SEQ ID NO: 2451 - RNA, 20 nt, synthetic construct
  source 1..20: mol_type = other RNA
taaatggctacttgggggag

SEQ ID NO: 2452 - RNA, 20 nt, synthetic construct
  source 1..20: mol_type = other RNA
tcaattaaatggctacttgg

SEQ ID NO: 2453 - RNA, 20 nt, synthetic construct
  source 1..20: mol_type = other RNA
acaattcaattaaatggcta

SEQ ID NO: 2454 - RNA, 20 nt, synthetic construct
  source 1..20: mol_type = other RNA
tggtaggtaaaaaaatatac

SEQ ID NO: 2455 - RNA, 20 nt, synthetic construct
  source 1..20: mol_type = other RNA
tacactaattttggtaggta

SEQ ID NO: 2456 - RNA, 20 nt, synthetic construct
  source 1..20: mol_type = other RNA
taggaatacactaattttgg

SEQ ID NO: 2457 - RNA, 20 nt, synthetic construct
  source 1..20: mol_type = other RNA
gacaaaattaggaatacact

SEQ ID NO: 2458 - RNA, 20 nt, synthetic construct
  source 1..20: mol_type = other RNA
gtgtacatgacaaaattagg

SEQ ID NO: 2459 - RNA, 20 nt, synthetic construct
  source 1..20: mol_type = other RNA
ctacatgtgtacatgacaaa

SEQ ID NO: 2460 - RNA, 20 nt, synthetic construct
  source 1..20: mol_type = other RNA
agtcttttctacatgtgtac

SEQ ID NO: 2461 - RNA, 20 nt, synthetic construct
  source 1..20: mol_type = other RNA
cttccagtcttttctacatg

SEQ ID NO: 2462 - RNA, 20 nt, synthetic construct
  source 1..20: mol_type = other RNA
gtacttcttccagtcttttc

SEQ ID NO: 2463 - RNA, 20 nt, synthetic construct
  source 1..20: mol_type = other RNA
atattgtacttcttccagtc

SEQ ID NO: 2464 - RNA, 20 nt, synthetic construct
  source 1..20: mol_type = other RNA
tttttatattgtacttcttc

SEQ ID NO: 2465 - RNA, 20 nt, synthetic construct
  source 1..20: mol_type = other RNA
agcactttttatattgtact

SEQ ID NO: 2466 - RNA, 20 nt, synthetic construct
  source 1..20: mol_type = other RNA
ctacagataagcacttttta

SEQ ID NO: 2467 - RNA, 20 nt, synthetic construct
  source 1..20: mol_type = other RNA
cataacctacagataagcac

SEQ ID NO: 2468 - RNA, 20 nt, synthetic construct
  source 1..20: mol_type = other RNA
cacatttgcataacctacag

SEQ ID NO: 2469 - RNA, 20 nt, synthetic construct
  source 1..20: mol_type = other RNA
ccctcattcacatttgcata

SEQ ID NO: 2470 - RNA, 20 nt, synthetic construct
  source 1..20: mol_type = other RNA
tgaaaaccaccctcattcac

SEQ ID NO: 2471 - RNA, 20 nt, synthetic construct
  source 1..20: mol_type = other RNA
aaagcatgaggaagaaaatg

SEQ ID NO: 2472 - RNA, 20 nt, synthetic construct
  source 1..20: mol_type = other RNA
gatgcagaaaagcatgagga

SEQ ID NO: 2473 - RNA, 20 nt, synthetic construct
  source 1..20: mol_type = other RNA
tttagaagatgcagaaaagc

SEQ ID NO: 2474 - RNA, 20 nt, synthetic construct
  source 1..20: mol_type = other RNA
gtatataatttagaagatgc

SEQ ID NO: 2475 - RNA, 20 nt, synthetic construct
  source 1..20: mol_type = other RNA
tacccttattgtatataatt

SEQ ID NO: 2476 - RNA, 20 nt, synthetic construct
  source 1..20: mol_type = other RNA
tagtttacccttattgtata

SEQ ID NO: 2477 - RNA, 20 nt, synthetic construct
  source 1..20: mol_type = other RNA
taaaaaatagtttaccctta

SEQ ID NO: 2478 - RNA, 20 nt, synthetic construct
  source 1..20: mol_type = other RNA
cttatatgtttaaaaaatag

SEQ ID NO: 2479 - RNA, 20 nt, synthetic construct
  source 1..20: mol_type = other RNA
catttaataacttatatgtt

SEQ ID NO: 2480 - RNA, 20 nt, synthetic construct
  source 1..20: mol_type = other RNA
cattattttcatttaataac

SEQ ID NO: 2481 - RNA, 20 nt, synthetic construct
  source 1..20: mol_type = other RNA
ttcctttgtcatattcatta

SEQ ID NO: 2482 - RNA, 20 nt, synthetic construct
  source 1..20: mol_type = other RNA
ttgatatttcctttgtcata

SEQ ID NO: 2483 - RNA, 20 nt, synthetic construct
  source 1..20: mol_type = other RNA
gcattattattgatatttcc

SEQ ID NO: 2484 - RNA, 20 nt, synthetic construct
  source 1..20: mol_type = other RNA
attatgcattattattgata

SEQ ID NO: 2485 - RNA, 20 nt, synthetic construct
  source 1..20: mol_type = other RNA
taataaaattttattatgca

SEQ ID NO: 2486 - RNA, 20 nt, synthetic construct
  source 1..20: mol_type = other RNA
gtatttctaaaaatcattaa

SEQ ID NO: 2487 - RNA, 20 nt, synthetic construct
  source 1..20: mol_type = other RNA
gtactctctatgtatttcta

SEQ ID NO: 2488 - RNA, 20 nt, synthetic construct
  source 1..20: mol_type = other RNA
atagttgtactctctatgta

SEQ ID NO: 2489 - RNA, 20 nt, synthetic construct
  source 1..20: mol_type = other RNA
ggagaacacccacatagttg

SEQ ID NO: 2490 - RNA, 20 nt, synthetic construct
  source 1..20: mol_type = other RNA
tatttggagaacacccacat

SEQ ID NO: 2491 - RNA, 20 nt, synthetic construct
  source 1..20: mol_type = other RNA
gctaatatttggagaacacc

SEQ ID NO: 2492 - RNA, 20 nt, synthetic construct
  source 1..20: mol_type = other RNA
actacagctaatatttggag

SEQ ID NO: 2493 - RNA, 20 nt, synthetic construct
  source 1..20: mol_type = other RNA
gactgaactacagctaatat

SEQ ID NO: 2494 - RNA, 20 nt, synthetic construct
  source 1..20: mol_type = other RNA
gcaatgactgaactacagct

SEQ ID NO: 2495 - RNA, 18 nt, synthetic construct
  source 1..18: mol_type = other RNA
tctgagtagaagtaatgg

SEQ ID NO: 2496 - RNA, 19 nt, synthetic construct
  source 1..19: mol_type = other RNA
atctgagtagaagtaatgg

SEQ ID NO: 2497 - RNA, 19 nt, synthetic construct
  source 1..19: mol_type = other RNA
tctgagtagaagtaatgga

SEQ ID NO: 2498 - RNA, 19 nt, synthetic construct
  source 1..19: mol_type = other RNA
gagtagaagtaatggatgc

SEQ ID NO: 2499 - RNA, 19 nt, synthetic construct
  source 1..19: mol_type = other RNA
agtagaagtaatggatgcc

SEQ ID NO: 2500 - RNA, 19 nt, synthetic construct
  source 1..19: mol_type = other RNA
gtagaagtaatggatgcca

SEQ ID NO: 2501 - RNA, 19 nt, synthetic construct
  source 1..19: mol_type = other RNA
gatgccacttccaggattg

SEQ ID NO: 2502 - RNA, 19 nt, synthetic construct
  source 1..19: mol_type = other RNA
cacttccaggattggccca

SEQ ID NO: 2503 - RNA, 19 nt, synthetic construct
  source 1..19: mol_type = other RNA
acttccaggattggcccac

SEQ ID NO: 2504 - RNA, 19 nt, synthetic construct
  source 1..19: mol_type = other RNA
ttccaggattggcccacag

SEQ ID NO: 2505 - RNA, 19 nt, synthetic construct
  source 1..19: mol_type = other RNA
aggattggcccacaggaac

SEQ ID NO: 2506 - RNA, 19 nt, synthetic construct
  source 1..19: mol_type = other RNA
gattggcccacaggaactt

SEQ ID NO: 2507 - RNA, 19 nt, synthetic construct
  source 1..19: mol_type = other RNA
gcccacaggaactttccat

SEQ ID NO: 2508 - RNA, 19 nt, synthetic construct
  source 1..19: mol_type = other RNA
ccacaggaactttccatac

SEQ ID NO: 2509 - RNA, 19 nt, synthetic construct
  source 1..19: mol_type = other RNA
cacaggaactttccataca

SEQ ID NO: 2510 - RNA, 20 nt, synthetic construct
  source 1..20: mol_type = other RNA
atctgagtagaagtaatgga

SEQ ID NO: 2511 - RNA, 20 nt, synthetic construct
  source 1..20: mol_type = other RNA
tctgagtagaagtaatggat

SEQ ID NO: 2512 - RNA, 20 nt, synthetic construct
  source 1..20: mol_type = other RNA
ctgagtagaagtaatggatg

SEQ ID NO: 2513 - RNA, 20 nt, synthetic construct
  source 1..20: mol_type = other RNA
tgagtagaagtaatggatgc

SEQ ID NO: 2514 - RNA, 20 nt, synthetic construct
  source 1..20: mol_type = other RNA
agtagaagtaatggatgcca

SEQ ID NO: 2515 - RNA, 20 nt, synthetic construct
  source 1..20: mol_type = other RNA
gtagaagtaatggatgccac

SEQ ID NO: 2516 - RNA, 20 nt, synthetic construct
  source 1..20: mol_type = other RNA
tagaagtaatggatgccact

SEQ ID NO: 2517 - RNA, 20 nt, synthetic construct
  source 1..20: mol_type = other RNA
ggatgccacttccaggattg

SEQ ID NO: 2518 - RNA, 20 nt, synthetic construct
  source 1..20: mol_type = other RNA
tgccacttccaggattggcc

SEQ ID NO: 2519 - RNA, 20 nt, synthetic construct
  source 1..20: mol_type = other RNA
ccacttccaggattggccca

SEQ ID NO: 2520 - RNA, 20 nt, synthetic construct
  source 1..20: mol_type = other RNA
cacttccaggattggcccac

SEQ ID NO: 2521 - RNA, 20 nt, synthetic construct
  source 1..20: mol_type = other RNA
acttccaggattggcccaca

SEQ ID NO: 2522 - RNA, 20 nt, synthetic construct
  source 1..20: mol_type = other RNA
cttccaggattggcccacag

SEQ ID NO: 2523 - RNA, 20 nt, synthetic construct
  source 1..20: mol_type = other RNA
caggattggcccacaggaac

SEQ ID NO: 2524 - RNA, 20 nt, synthetic construct
  source 1..20: mol_type = other RNA
aggattggcccacaggaact

SEQ ID NO: 2525 - RNA, 20 nt, synthetic construct
  source 1..20: mol_type = other RNA
ggattggcccacaggaactt

SEQ ID NO: 2526 - RNA, 20 nt, synthetic construct
  source 1..20: mol_type = other RNA
tggcccacaggaactttcca

SEQ ID NO: 2527 - RNA, 20 nt, synthetic construct
  source 1..20: mol_type = other RNA
ggcccacaggaactttccat

SEQ ID NO: 2528 - RNA, 20 nt, synthetic construct
  source 1..20: mol_type = other RNA
gcccacaggaactttccata

SEQ ID NO: 2529 - RNA, 20 nt, synthetic construct
  source 1..20: mol_type = other RNA
ccacaggaactttccataca

SEQ ID NO: 2530 - RNA, 20 nt, synthetic construct
  source 1..20: mol_type = other RNA
cacaggaactttccatacaa

SEQ ID NO: 2531 - RNA, 20 nt, synthetic construct
  source 1..20: mol_type = other RNA
acaggaactttccatacaaa

SEQ ID NO: 2532 - RNA, 20 nt, synthetic construct
  source 1..20: mol_type = other RNA
caggaactttccatacaaaa

SEQ ID NO: 2533 - RNA, 20 nt, synthetic construct
  source 1..20: mol_type = other RNA
ggaactttccatacaaaatg

SEQ ID NO: 2534 - RNA, 20 nt, synthetic construct
  source 1..20: mol_type = other RNA
ctttccatacaaaatgctcc

SEQ ID NO: 2535 - RNA, 21 nt, synthetic construct
  source 1..21: mol_type = other RNA
gaatctgagtagaagtaatgg

SEQ ID NO: 2536 - RNA, 21 nt, synthetic construct
  source 1..21: mol_type = other RNA
aatctgagtagaagtaatgga

SEQ ID NO: 2537 - RNA, 21 nt, synthetic construct
  source 1..21: mol_type = other RNA
atctgagtagaagtaatggat

SEQ ID NO: 2538 - RNA, 21 nt, synthetic construct
  source 1..21: mol_type = other RNA
tctgagtagaagtaatggatg

SEQ ID NO: 2539 - RNA, 21 nt, synthetic construct
  source 1..21: mol_type = other RNA
ctgagtagaagtaatggatgc

SEQ ID NO: 2540 - RNA, 21 nt, synthetic construct
  source 1..21: mol_type = other RNA
tgagtagaagtaatggatgcc

SEQ ID NO: 2541 - RNA, 21 nt, synthetic construct
  source 1..21: mol_type = other RNA
gagtagaagtaatggatgcca

SEQ ID NO: 2542 - RNA, 21 nt, synthetic construct
  source 1..21: mol_type = other RNA
agtagaagtaatggatgccac

SEQ ID NO: 2543 - RNA, 21 nt, synthetic construct
  source 1..21: mol_type = other RNA
gtagaagtaatggatgccact

SEQ ID NO: 2544 - RNA, 21 nt, synthetic construct
  source 1..21: mol_type = other RNA
tagaagtaatggatgccactt

SEQ ID NO: 2545 - RNA, 21 nt, synthetic construct
  source 1..21: mol_type = other RNA
taatggatgccacttccagga

SEQ ID NO: 2546 - RNA, 21 nt, synthetic construct
  source 1..21: mol_type = other RNA
tggatgccacttccaggattg

SEQ ID NO: 2547 - RNA, 21 nt, synthetic construct
  source 1..21: mol_type = other RNA
ggatgccacttccaggattgg

SEQ ID NO: 2548 - RNA, 21 nt, synthetic construct
  source 1..21: mol_type = other RNA
gatgccacttccaggattggc

SEQ ID NO: 2549 - RNA, 21 nt, synthetic construct
  source 1..21: mol_type = other RNA
atgccacttccaggattggcc

SEQ ID NO: 2550 - RNA, 21 nt, synthetic construct
  source 1..21: mol_type = other RNA
tgccacttccaggattggccc

SEQ ID NO: 2551 - RNA, 21 nt, synthetic construct
  source 1..21: mol_type = other RNA
gccacttccaggattggccca

SEQ ID NO: 2552 - RNA, 21 nt, synthetic construct
  source 1..21: mol_type = other RNA
ccacttccaggattggcccac

SEQ ID NO: 2553 - RNA, 21 nt, synthetic construct
  source 1..21: mol_type = other RNA
cacttccaggattggcccaca

SEQ ID NO: 2554 - RNA, 21 nt, synthetic construct
  source 1..21: mol_type = other RNA
acttccaggattggcccacag

SEQ ID NO: 2555 - RNA, 21 nt, synthetic construct
  source 1..21: mol_type = other RNA
cttccaggattggcccacagg

SEQ ID NO: 2556 - RNA, 21 nt, synthetic construct
  source 1..21: mol_type = other RNA
ttccaggattggcccacagga

SEQ ID NO: 2557 - RNA, 21 nt, synthetic construct
  source 1..21: mol_type = other RNA
ccaggattggcccacaggaac

SEQ ID NO: 2558 - RNA, 21 nt, synthetic construct
  source 1..21: mol_type = other RNA
caggattggcccacaggaact

SEQ ID NO: 2559 - RNA, 21 nt, synthetic construct
  source 1..21: mol_type = other RNA
aggattggcccacaggaactt

SEQ ID NO: 2560 - RNA, 21 nt, synthetic construct
  source 1..21: mol_type = other RNA
ggattggcccacaggaacttt

SEQ ID NO: 2561 - RNA, 21 nt, synthetic construct
  source 1..21: mol_type = other RNA
gattggcccacaggaactttc

SEQ ID NO: 2562 - RNA, 21 nt, synthetic construct
  source 1..21: mol_type = other RNA
attggcccacaggaactttcc

SEQ ID NO: 2563 - RNA, 21 nt, synthetic construct
  source 1..21: mol_type = other RNA
ttggcccacaggaactttcca

SEQ ID NO: 2564 - RNA, 21 nt, synthetic construct
  source 1..21: mol_type = other RNA
tggcccacaggaactttccat

SEQ ID NO: 2565 - RNA, 21 nt, synthetic construct
  source 1..21: mol_type = other RNA
ggcccacaggaactttccata

SEQ ID NO: 2566 - RNA, 21 nt, synthetic construct
  source 1..21: mol_type = other RNA
gcccacaggaactttccatac

SEQ ID NO: 2567 - RNA, 21 nt, synthetic construct
  source 1..21: mol_type = other RNA
cccacaggaactttccataca

SEQ ID NO: 2568 - RNA, 21 nt, synthetic construct
  source 1..21: mol_type = other RNA
ccacaggaactttccatacaa

SEQ ID NO: 2569 - RNA, 21 nt, synthetic construct
  source 1..21: mol_type = other RNA
cacaggaactttccatacaaa

SEQ ID NO: 2570 - RNA, 21 nt, synthetic construct
  source 1..21: mol_type = other RNA
acaggaactttccatacaaaa

SEQ ID NO: 2571 - RNA, 21 nt, synthetic construct
  source 1..21: mol_type = other RNA
caggaactttccatacaaaat

SEQ ID NO: 2572 - RNA, 21 nt, synthetic construct
  source 1..21: mol_type = other RNA
aggaactttccatacaaaatg

SEQ ID NO: 2573 - RNA, 21 nt, synthetic construct
  source 1..21: mol_type = other RNA
ggaactttccatacaaaatgc

SEQ ID NO: 2574 - RNA, 21 nt, synthetic construct
  source 1..21: mol_type = other RNA
gaactttccatacaaaatgct

SEQ ID NO: 2575 - RNA, 21 nt, synthetic construct
  source 1..21: mol_type = other RNA
actttccatacaaaatgctcc

SEQ ID NO: 2576 - RNA, 22 nt, synthetic construct
  source 1..22: mol_type = other RNA
gaatctgagtagaagtaatgga

SEQ ID NO: 2577 - RNA, 22 nt, synthetic construct
  source 1..22: mol_type = other RNA
aatctgagtagaagtaatggat

SEQ ID NO: 2578 - RNA, 22 nt, synthetic construct
  source 1..22: mol_type = other RNA
atctgagtagaagtaatggatg

SEQ ID NO: 2579 - RNA, 22 nt, synthetic construct
  source 1..22: mol_type = other RNA
tctgagtagaagtaatggatgc

SEQ ID NO: 2580 - RNA, 22 nt, synthetic construct
  source 1..22: mol_type = other RNA
ctgagtagaagtaatggatgcc

SEQ ID NO: 2581 - RNA, 22 nt, synthetic construct
  source 1..22: mol_type = other RNA
tgagtagaagtaatggatgcca

SEQ ID NO: 2582 - RNA, 22 nt, synthetic construct
  source 1..22: mol_type = other RNA
gagtagaagtaatggatgccac

SEQ ID NO: 2583 - RNA, 22 nt, synthetic construct
  source 1..22: mol_type = other RNA
agtagaagtaatggatgccact

SEQ ID NO: 2584 - RNA, 22 nt, synthetic construct
  source 1..22: mol_type = other RNA
gtagaagtaatggatgccactt

SEQ ID NO: 2585 - RNA, 22 nt, synthetic construct
  source 1..22: mol_type = other RNA
tagaagtaatggatgccacttc

SEQ ID NO: 2586 - RNA, 22 nt, synthetic construct
  source 1..22: mol_type = other RNA
aagtaatggatgccacttccag

SEQ ID NO: 2587 - RNA, 22 nt, synthetic construct
  source 1..22: mol_type = other RNA
agtaatggatgccacttccagg

SEQ ID NO: 2588 - RNA, 22 nt, synthetic construct
  source 1..22: mol_type = other RNA
gtaatggatgccacttccagga

SEQ ID NO: 2589 - RNA, 22 nt, synthetic construct
  source 1..22: mol_type = other RNA
taatggatgccacttccaggat

SEQ ID NO: 2590 - RNA, 22 nt, synthetic construct
  source 1..22: mol_type = other RNA
atggatgccacttccaggattg

SEQ ID NO: 2591 - RNA, 22 nt, synthetic construct
  source 1..22: mol_type = other RNA
tggatgccacttccaggattgg

SEQ ID NO: 2592 - RNA, 22 nt, synthetic construct
  source 1..22: mol_type = other RNA
ggatgccacttccaggattggc

SEQ ID NO: 2593 - RNA, 22 nt, synthetic construct
  source 1..22: mol_type = other RNA
gatgccacttccaggattggcc

SEQ ID NO: 2594 - RNA, 22 nt, synthetic construct
  source 1..22: mol_type = other RNA
atgccacttccaggattggccc

SEQ ID NO: 2595 - RNA, 22 nt, synthetic construct
  source 1..22: mol_type = other RNA
tgccacttccaggattggccca

SEQ ID NO: 2596 - RNA, 22 nt, synthetic construct
  source 1..22: mol_type = other RNA
gccacttccaggattggcccac

SEQ ID NO: 2597 - RNA, 22 nt, synthetic construct
  source 1..22: mol_type = other RNA
ccacttccaggattggcccaca

SEQ ID NO: 2598 - RNA, 22 nt, synthetic construct
  source 1..22: mol_type = other RNA
cacttccaggattggcccacag

SEQ ID NO: 2599 - RNA, 22 nt, synthetic construct
  source 1..22: mol_type = other RNA
acttccaggattggcccacagg

SEQ ID NO: 2600 - RNA, 22 nt, synthetic construct
  source 1..22: mol_type = other RNA
cttccaggattggcccacagga

SEQ ID NO: 2601 - RNA, 22 nt, synthetic construct
  source 1..22: mol_type = other RNA
ttccaggattggcccacaggaa

SEQ ID NO: 2602 - RNA, 22 nt, synthetic construct
  source 1..22: mol_type = other RNA
tccaggattggcccacaggaac

SEQ ID NO: 2603 - RNA, 22 nt, synthetic construct
  source 1..22: mol_type = other RNA
ccaggattggcccacaggaact

SEQ ID NO: 2604 - RNA, 22 nt, synthetic construct
  source 1..22: mol_type = other RNA
caggattggcccacaggaactt

SEQ ID NO: 2605 - RNA, 22 nt, synthetic construct
  source 1..22: mol_type = other RNA
aggattggcccacaggaacttt

SEQ ID NO: 2606 - RNA, 22 nt, synthetic construct
  source 1..22: mol_type = other RNA
ggattggcccacaggaactttc

SEQ ID NO: 2607 - RNA, 22 nt, synthetic construct
  source 1..22: mol_type = other RNA
gattggcccacaggaactttcc

SEQ ID NO: 2608 - RNA, 22 nt, synthetic construct
  source 1..22: mol_type = other RNA
attggcccacaggaactttcca

SEQ ID NO: 2609 - RNA, 22 nt, synthetic construct
  source 1..22: mol_type = other RNA
ttggcccacaggaactttccat

SEQ ID NO: 2610 - RNA, 22 nt, synthetic construct
  source 1..22: mol_type = other RNA
tggcccacaggaactttccata

SEQ ID NO: 2611 - RNA, 22 nt, synthetic construct
  source 1..22: mol_type = other RNA
ggcccacaggaactttccatac

SEQ ID NO: 2612 - RNA, 22 nt, synthetic construct
  source 1..22: mol_type = other RNA
gcccacaggaactttccataca

SEQ ID NO: 2613 - RNA, 22 nt, synthetic construct
  source 1..22: mol_type = other RNA
cccacaggaactttccatacaa

SEQ ID NO: 2614 - RNA, 22 nt, synthetic construct
  source 1..22: mol_type = other RNA
ccacaggaactttccatacaaa

SEQ ID NO: 2615 - RNA, 22 nt, synthetic construct
  source 1..22: mol_type = other RNA
cacaggaactttccatacaaaa

SEQ ID NO: 2616 - RNA, 22 nt, synthetic construct
  source 1..22: mol_type = other RNA
acaggaactttccatacaaaat

SEQ ID NO: 2617 - RNA, 22 nt, synthetic construct
  source 1..22: mol_type = other RNA
caggaactttccatacaaaatg

SEQ ID NO: 2618 - RNA, 22 nt, synthetic construct
  source 1..22: mol_type = other RNA
aggaactttccatacaaaatgc

SEQ ID NO: 2619 - RNA, 22 nt, synthetic construct
  source 1..22: mol_type = other RNA
ggaactttccatacaaaatgct

SEQ ID NO: 2620 - RNA, 22 nt, synthetic construct
  source 1..22: mol_type = other RNA
gaactttccatacaaaatgctc

SEQ ID NO: 2621 - RNA, 22 nt, synthetic construct
  source 1..22: mol_type = other RNA
aactttccatacaaaatgctcc

SEQ ID NO: 2622 - RNA, 23 nt, synthetic construct
  source 1..23: mol_type = other RNA
gaatctgagtagaagtaatggat

SEQ ID NO: 2623 - RNA, 23 nt, synthetic construct
  source 1..23: mol_type = other RNA
aatctgagtagaagtaatggatg

SEQ ID NO: 2624 - RNA, 23 nt, synthetic construct
  source 1..23: mol_type = other RNA
atctgagtagaagtaatggatgc

SEQ ID NO: 2625 - RNA, 23 nt, synthetic construct
  source 1..23: mol_type = other RNA
tctgagtagaagtaatggatgcc

SEQ ID NO: 2626 - RNA, 23 nt, synthetic construct
  source 1..23: mol_type = other RNA
ctgagtagaagtaatggatgcca

SEQ ID NO: 2627 - RNA, 23 nt, synthetic construct
  source 1..23: mol_type = other RNA
tgagtagaagtaatggatgccac

SEQ ID NO: 2628 - RNA, 23 nt, synthetic construct
  source 1..23: mol_type = other RNA
gagtagaagtaatggatgccact

SEQ ID NO: 2629 - RNA, 23 nt, synthetic construct
  source 1..23: mol_type = other RNA
agtagaagtaatggatgccactt

SEQ ID NO: 2630 - RNA, 23 nt, synthetic construct
  source 1..23: mol_type = other RNA
gtagaagtaatggatgccacttc

SEQ ID NO: 2631 - RNA, 23 nt, synthetic construct
  source 1..23: mol_type = other RNA
tagaagtaatggatgccacttcc

SEQ ID NO: 2632 - RNA, 23 nt, synthetic construct
  source 1..23: mol_type = other RNA
gaagtaatggatgccacttccag

SEQ ID NO: 2633 - RNA, 23 nt, synthetic construct
  source 1..23: mol_type = other RNA
aagtaatggatgccacttccagg

SEQ ID NO: 2634 - RNA, 23 nt, synthetic construct
  source 1..23: mol_type = other RNA
agtaatggatgccacttccagga

SEQ ID NO: 2635 - RNA, 23 nt, synthetic construct
  source 1..23: mol_type = other RNA
gtaatggatgccacttccaggat

SEQ ID NO: 2636 - RNA, 23 nt, synthetic construct
  source 1..23: mol_type = other RNA
taatggatgccacttccaggatt

SEQ ID NO: 2637 - RNA, 23 nt, synthetic construct
  source 1..23: mol_type = other RNA
aatggatgccacttccaggattg

SEQ ID NO: 2638 - RNA, 23 nt, synthetic construct
  source 1..23: mol_type = other RNA
atggatgccacttccaggattgg

SEQ ID NO: 2639 - RNA, 23 nt, synthetic construct
  source 1..23: mol_type = other RNA
tggatgccacttccaggattggc

SEQ ID NO: 2640 - RNA, 23 nt, synthetic construct
  source 1..23: mol_type = other RNA
ggatgccacttccaggattggcc

SEQ ID NO: 2641 - RNA, 23 nt, synthetic construct
  source 1..23: mol_type = other RNA
gatgccacttccaggattggccc

SEQ ID NO: 2642 - RNA, 23 nt, synthetic construct
  source 1..23: mol_type = other RNA
atgccacttccaggattggccca

SEQ ID NO: 2643 - RNA, 23 nt, synthetic construct
  source 1..23: mol_type = other RNA
tgccacttccaggattggcccac

SEQ ID NO: 2644 - RNA, 23 nt, synthetic construct
  source 1..23: mol_type = other RNA
gccacttccaggattggcccaca

SEQ ID NO: 2645 - RNA, 23 nt, synthetic construct
  source 1..23: mol_type = other RNA
ccacttccaggattggcccacag

SEQ ID NO: 2646 - RNA, 23 nt, synthetic construct
  source 1..23: mol_type = other RNA
cacttccaggattggcccacagg

SEQ ID NO: 2647 - RNA, 23 nt, synthetic construct
  source 1..23: mol_type = other RNA
acttccaggattggcccacagga

SEQ ID NO: 2648 - RNA, 23 nt, synthetic construct
  source 1..23: mol_type = other RNA
cttccaggattggcccacaggaa

SEQ ID NO: 2649 - RNA, 23 nt, synthetic construct
  source 1..23: mol_type = other RNA
ttccaggattggcccacaggaac

SEQ ID NO: 2650 - RNA, 23 nt, synthetic construct
  source 1..23: mol_type = other RNA
tccaggattggcccacaggaact

SEQ ID NO: 2651 - RNA, 23 nt, synthetic construct
  source 1..23: mol_type = other RNA
ccaggattggcccacaggaactt

SEQ ID NO: 2652 - RNA, 23 nt, synthetic construct
  source 1..23: mol_type = other RNA
caggattggcccacaggaacttt

SEQ ID NO: 2653 - RNA, 23 nt, synthetic construct
  source 1..23: mol_type = other RNA
aggattggcccacaggaactttc

SEQ ID NO: 2654 - RNA, 23 nt, synthetic construct
  source 1..23: mol_type = other RNA
ggattggcccacaggaactttcc

SEQ ID NO: 2655 - RNA, 23 nt, synthetic construct
  source 1..23: mol_type = other RNA
gattggcccacaggaactttcca

SEQ ID NO: 2656 - RNA, 23 nt, synthetic construct
  source 1..23: mol_type = other RNA
attggcccacaggaactttccat

SEQ ID NO: 2657 - RNA, 23 nt, synthetic construct
  source 1..23: mol_type = other RNA
ttggcccacaggaactttccata

SEQ ID NO: 2658 - RNA, 23 nt, synthetic construct
  source 1..23: mol_type = other RNA
tggcccacaggaactttccatac

SEQ ID NO: 2659 - RNA, 23 nt, synthetic construct
  source 1..23: mol_type = other RNA
ggcccacaggaactttccataca

SEQ ID NO: 2660 - RNA, 23 nt, synthetic construct
  source 1..23: mol_type = other RNA
gcccacaggaactttccatacaa

SEQ ID NO: 2661 - RNA, 23 nt, synthetic construct
  source 1..23: mol_type = other RNA
cccacaggaactttccatacaaa

SEQ ID NO: 2662 - RNA, 23 nt, synthetic construct
  source 1..23: mol_type = other RNA
ccacaggaactttccatacaaaa

SEQ ID NO: 2663 - RNA, 23 nt, synthetic construct
  source 1..23: mol_type = other RNA
cacaggaactttccatacaaaat

SEQ ID NO: 2664 - RNA, 23 nt, synthetic construct
  source 1..23: mol_type = other RNA
acaggaactttccatacaaaatg

SEQ ID NO: 2665 - RNA, 23 nt, synthetic construct
  source 1..23: mol_type = other RNA
caggaactttccatacaaaatgc

SEQ ID NO: 2666 - RNA, 23 nt, synthetic construct
  source 1..23: mol_type = other RNA
aggaactttccatacaaaatgct

SEQ ID NO: 2667 - RNA, 23 nt, synthetic construct
  source 1..23: mol_type = other RNA
ggaactttccatacaaaatgctc

SEQ ID NO: 2668 - RNA, 23 nt, synthetic construct
  source 1..23: mol_type = other RNA
gaactttccatacaaaatgctcc

SEQ ID NO: 2669 - RNA, 24 nt, synthetic construct
  source 1..24: mol_type = other RNA
gaatctgagtagaagtaatggatg

SEQ ID NO: 2670 - RNA, 24 nt, synthetic construct
  source 1..24: mol_type = other RNA
aatctgagtagaagtaatggatgc

SEQ ID NO: 2671 - RNA, 24 nt, synthetic construct
  source 1..24: mol_type = other RNA
atctgagtagaagtaatggatgcc

SEQ ID NO: 2672 - RNA, 24 nt, synthetic construct
  source 1..24: mol_type = other RNA
tctgagtagaagtaatggatgcca

SEQ ID NO: 2673 - RNA, 24 nt, synthetic construct
  source 1..24: mol_type = other RNA
ctgagtagaagtaatggatgccac

SEQ ID NO: 2674 - RNA, 24 nt, synthetic construct
  source 1..24: mol_type = other RNA
tgagtagaagtaatggatgccact

SEQ ID NO: 2675 - RNA, 24 nt, synthetic construct
  source 1..24: mol_type = other RNA
gagtagaagtaatggatgccactt

SEQ ID NO: 2676 - RNA, 24 nt, synthetic construct
  source 1..24: mol_type = other RNA
agtagaagtaatggatgccacttc

SEQ ID NO: 2677 - RNA, 24 nt, synthetic construct
  source 1..24: mol_type = other RNA
gtagaagtaatggatgccacttcc

SEQ ID NO: 2678 - RNA, 24 nt, synthetic construct
  source 1..24: mol_type = other RNA
tagaagtaatggatgccacttcca

SEQ ID NO: 2679 - RNA, 24 nt, synthetic construct
  source 1..24: mol_type = other RNA
agaagtaatggatgccacttccag

SEQ ID NO: 2680 - RNA, 24 nt, synthetic construct
  source 1..24: mol_type = other RNA
gaagtaatggatgccacttccagg

SEQ ID NO: 2681 - RNA, 24 nt, synthetic construct
  source 1..24: mol_type = other RNA
aagtaatggatgccacttccagga

SEQ ID NO: 2682 - RNA, 24 nt, synthetic construct
  source 1..24: mol_type = other RNA
agtaatggatgccacttccaggat

SEQ ID NO: 2683 - RNA, 24 nt, synthetic construct
  source 1..24: mol_type = other RNA
gtaatggatgccacttccaggatt

SEQ ID NO: 2684 - RNA, 24 nt, synthetic construct
  source 1..24: mol_type = other RNA
taatggatgccacttccaggattg

SEQ ID NO: 2685 - RNA, 24 nt, synthetic construct
  source 1..24: mol_type = other RNA
aatggatgccacttccaggattgg

SEQ ID NO: 2686 - RNA, 24 nt, synthetic construct
  source 1..24: mol_type = other RNA
atggatgccacttccaggattggc

SEQ ID NO: 2687 - RNA, 24 nt, synthetic construct
  source 1..24: mol_type = other RNA
tggatgccacttccaggattggcc

SEQ ID NO: 2688 - RNA, 24 nt, synthetic construct
  source 1..24: mol_type = other RNA
ggatgccacttccaggattggccc

SEQ ID NO: 2689 - RNA, 24 nt, synthetic construct
  source 1..24: mol_type = other RNA
gatgccacttccaggattggccca

SEQ ID NO: 2690 - RNA, 24 nt, synthetic construct
  source 1..24: mol_type = other RNA
atgccacttccaggattggcccac

SEQ ID NO: 2691 - RNA, 24 nt, synthetic construct
  source 1..24: mol_type = other RNA
tgccacttccaggattggcccaca

SEQ ID NO: 2692 - RNA, 24 nt, synthetic construct
  source 1..24: mol_type = other RNA
gccacttccaggattggcccacag

SEQ ID NO: 2693 - RNA, 24 nt, synthetic construct
  source 1..24: mol_type = other RNA
ccacttccaggattggcccacagg

SEQ ID NO: 2694 - RNA, 24 nt, synthetic construct
  source 1..24: mol_type = other RNA
cacttccaggattggcccacagga

SEQ ID NO: 2695 - RNA, 24 nt, synthetic construct
  source 1..24: mol_type = other RNA
acttccaggattggcccacaggaa

SEQ ID NO: 2696 - RNA, 24 nt, synthetic construct
  source 1..24: mol_type = other RNA
cttccaggattggcccacaggaac

SEQ ID NO: 2697 - RNA, 24 nt, synthetic construct
  source 1..24: mol_type = other RNA
ttccaggattggcccacaggaact

SEQ ID NO: 2698 - RNA, 24 nt, synthetic construct
  source 1..24: mol_type = other RNA
tccaggattggcccacaggaactt

SEQ ID NO: 2699 - RNA, 24 nt, synthetic construct
  source 1..24: mol_type = other RNA
ccaggattggcccacaggaacttt

SEQ ID NO: 2700 - RNA, 24 nt, synthetic construct
  source 1..24: mol_type = other RNA
caggattggcccacaggaactttc

SEQ ID NO: 2701 - RNA, 24 nt, synthetic construct
  source 1..24: mol_type = other RNA
aggattggcccacaggaactttcc

SEQ ID NO: 2702 - RNA, 24 nt, synthetic construct
  source 1..24: mol_type = other RNA
ggattggcccacaggaactttcca

SEQ ID NO: 2703 - RNA, 24 nt, synthetic construct
  source 1..24: mol_type = other RNA
gattggcccacaggaactttccat

SEQ ID NO: 2704 - RNA, 24 nt, synthetic construct
  source 1..24: mol_type = other RNA
attggcccacaggaactttccata

SEQ ID NO: 2705 - RNA, 24 nt, synthetic construct
  source 1..24: mol_type = other RNA
ttggcccacaggaactttccatac

SEQ ID NO: 2706 - RNA, 24 nt, synthetic construct
  source 1..24: mol_type = other RNA
tggcccacaggaactttccataca

SEQ ID NO: 2707 - RNA, 24 nt, synthetic construct
  source 1..24: mol_type = other RNA
ggcccacaggaactttccatacaa

SEQ ID NO: 2708 - RNA, 24 nt, synthetic construct
  source 1..24: mol_type = other RNA
gcccacaggaactttccatacaaa

SEQ ID NO: 2709 - RNA, 24 nt, synthetic construct
  source 1..24: mol_type = other RNA
cccacaggaactttccatacaaaa

SEQ ID NO: 2710 - RNA, 24 nt, synthetic construct
  source 1..24: mol_type = other RNA
ccacaggaactttccatacaaaat

SEQ ID NO: 2711 - RNA, 24 nt, synthetic construct
  source 1..24: mol_type = other RNA
cacaggaactttccatacaaaatg

SEQ ID NO: 2712 - RNA, 24 nt, synthetic construct
  source 1..24: mol_type = other RNA
acaggaactttccatacaaaatgc

SEQ ID NO: 2713 - RNA, 24 nt, synthetic construct
  source 1..24: mol_type = other RNA
caggaactttccatacaaaatgct

SEQ ID NO: 2714 - RNA, 24 nt, synthetic construct
  source 1..24: mol_type = other RNA
aggaactttccatacaaaatgctc

SEQ ID NO: 2715 - RNA, 24 nt, synthetic construct
  source 1..24: mol_type = other RNA
ggaactttccatacaaaatgctcc

SEQ ID NO: 2716 - RNA, 25 nt, synthetic construct
  source 1..25: mol_type = other RNA
gaatctgagtagaagtaatggatgc

SEQ ID NO: 2717 - RNA, 25 nt, synthetic construct
  source 1..25: mol_type = other RNA
aatctgagtagaagtaatggatgcc

SEQ ID NO: 2718 - RNA, 25 nt, synthetic construct
  source 1..25: mol_type = other RNA
atctgagtagaagtaatggatgcca

SEQ ID NO: 2719 - RNA, 25 nt, synthetic construct
  source 1..25: mol_type = other RNA
tctgagtagaagtaatggatgccac

SEQ ID NO: 2720 - RNA, 25 nt, synthetic construct
  source 1..25: mol_type = other RNA
ctgagtagaagtaatggatgccact

SEQ ID NO: 2721 - RNA, 25 nt, synthetic construct
  source 1..25: mol_type = other RNA
tgagtagaagtaatggatgccactt

SEQ ID NO: 2722 - RNA, 25 nt, synthetic construct
  source 1..25: mol_type = other RNA
gagtagaagtaatggatgccacttc

SEQ ID NO: 2723 - RNA, 25 nt, synthetic construct
  source 1..25: mol_type = other RNA
agtagaagtaatggatgccacttcc

SEQ ID NO: 2724 - RNA, 25 nt, synthetic construct
  source 1..25: mol_type = other RNA
gtagaagtaatggatgccacttcca

SEQ ID NO: 2725 - RNA, 25 nt, synthetic construct
  source 1..25: mol_type = other RNA
tagaagtaatggatgccacttccag

SEQ ID NO: 2726 - RNA, 25 nt, synthetic construct
  source 1..25: mol_type = other RNA
agaagtaatggatgccacttccagg

SEQ ID NO: 2727 - RNA, 25 nt, synthetic construct
  source 1..25: mol_type = other RNA
gaagtaatggatgccacttccagga

SEQ ID NO: 2728 - RNA, 25 nt, synthetic construct
  source 1..25: mol_type = other RNA
aagtaatggatgccacttccaggat

SEQ ID NO: 2729 - RNA, 25 nt, synthetic construct
  source 1..25: mol_type = other RNA
agtaatggatgccacttccaggatt

SEQ ID NO: 2730 - RNA, 25 nt, synthetic construct
  source 1..25: mol_type = other RNA
gtaatggatgccacttccaggattg

SEQ ID NO: 2731 - RNA, 25 nt, synthetic construct
  source 1..25: mol_type = other RNA
taatggatgccacttccaggattgg

SEQ ID NO: 2732 - RNA, 25 nt, synthetic construct
  source 1..25: mol_type = other RNA
aatggatgccacttccaggattggc

SEQ ID NO: 2733 - RNA, 25 nt, synthetic construct
  source 1..25: mol_type = other RNA
atggatgccacttccaggattggcc

SEQ ID NO: 2734 - RNA, 25 nt, synthetic construct
  source 1..25: mol_type = other RNA
tggatgccacttccaggattggccc

SEQ ID NO: 2735 - RNA, 25 nt, synthetic construct
  source 1..25: mol_type = other RNA
ggatgccacttccaggattggccca

SEQ ID NO: 2736 - RNA, 25 nt, synthetic construct
  source 1..25: mol_type = other RNA
gatgccacttccaggattggcccac

SEQ ID NO: 2737 - RNA, 25 nt, synthetic construct
  source 1..25: mol_type = other RNA
atgccacttccaggattggcccaca

SEQ ID NO: 2738 - RNA, 25 nt, synthetic construct
  source 1..25: mol_type = other RNA
tgccacttccaggattggcccacag

SEQ ID NO: 2739 - RNA, 25 nt, synthetic construct
  source 1..25: mol_type = other RNA
gccacttccaggattggcccacagg

SEQ ID NO: 2740 - RNA, 25 nt, synthetic construct
  source 1..25: mol_type = other RNA
ccacttccaggattggcccacagga

SEQ ID NO: 2741 - RNA, 25 nt, synthetic construct
  source 1..25: mol_type = other RNA
cacttccaggattggcccacaggaa

SEQ ID NO: 2742 - RNA, 25 nt, synthetic construct
  source 1..25: mol_type = other RNA
acttccaggattggcccacaggaac

SEQ ID NO: 2743 - RNA, 25 nt, synthetic construct
  source 1..25: mol_type = other RNA
cttccaggattggcccacaggaact

SEQ ID NO: 2744 - RNA, 25 nt, synthetic construct
  source 1..25: mol_type = other RNA
ttccaggattggcccacaggaactt

SEQ ID NO: 2745 - RNA, 25 nt, synthetic construct
  source 1..25: mol_type = other RNA
tccaggattggcccacaggaacttt

SEQ ID NO: 2746 - RNA, 25 nt, synthetic construct
  source 1..25: mol_type = other RNA
ccaggattggcccacaggaactttc

SEQ ID NO: 2747 - RNA, 25 nt, synthetic construct
  source 1..25: mol_type = other RNA
caggattggcccacaggaactttcc

SEQ ID NO: 2748 - RNA, 25 nt, synthetic construct
  source 1..25: mol_type = other RNA
aggattggcccacaggaactttcca

SEQ ID NO: 2749 - RNA, 25 nt, synthetic construct
  source 1..25: mol_type = other RNA
ggattggcccacaggaactttccat

SEQ ID NO: 2750 - RNA, 25 nt, synthetic construct
  source 1..25: mol_type = other RNA
gattggcccacaggaactttccata

SEQ ID NO: 2751 - RNA, 25 nt, synthetic construct
  source 1..25: mol_type = other RNA
attggcccacaggaactttccatac

SEQ ID NO: 2752 - RNA, 25 nt, synthetic construct
  source 1..25: mol_type = other RNA
ttggcccacaggaactttccataca

SEQ ID NO: 2753 - RNA, 25 nt, synthetic construct
  source 1..25: mol_type = other RNA
tggcccacaggaactttccatacaa

SEQ ID NO: 2754 - RNA, 25 nt, synthetic construct
  source 1..25: mol_type = other RNA
ggcccacaggaactttccatacaaa

SEQ ID NO: 2755 - RNA, 25 nt, synthetic construct
  source 1..25: mol_type = other RNA
gcccacaggaactttccatacaaaa

SEQ ID NO: 2756 - RNA, 25 nt, synthetic construct
  source 1..25: mol_type = other RNA
cccacaggaactttccatacaaaat

SEQ ID NO: 2757 - RNA, 25 nt, synthetic construct
  source 1..25: mol_type = other RNA
ccacaggaactttccatacaaaatg

SEQ ID NO: 2758 - RNA, 25 nt, synthetic construct
  source 1..25: mol_type = other RNA
cacaggaactttccatacaaaatgc

SEQ ID NO: 2759 - RNA, 25 nt, synthetic construct
  source 1..25: mol_type = other RNA
acaggaactttccatacaaaatgct

SEQ ID NO: 2760 - RNA, 25 nt, synthetic construct
  source 1..25: mol_type = other RNA
caggaactttccatacaaaatgctc

SEQ ID NO: 2761 - RNA, 25 nt, synthetic construct
  source 1..25: mol_type = other RNA
aggaactttccatacaaaatgctcc

SEQ ID NO: 2762 - RNA, 26 nt, synthetic construct
  source 1..26: mol_type = other RNA
gaatctgagtagaagtaatggatgcc

SEQ ID NO: 2763 - RNA, 26 nt, synthetic construct
  source 1..26: mol_type = other RNA
aatctgagtagaagtaatggatgcca

SEQ ID NO: 2764 - RNA, 26 nt, synthetic construct
  source 1..26: mol_type = other RNA
atctgagtagaagtaatggatgccac

SEQ ID NO: 2765 - RNA, 26 nt, synthetic construct
  source 1..26: mol_type = other RNA
tctgagtagaagtaatggatgccact

SEQ ID NO: 2766 - RNA, 26 nt, synthetic construct
  source 1..26: mol_type = other RNA
ctgagtagaagtaatggatgccactt

SEQ ID NO: 2767 - RNA, 26 nt, synthetic construct
  source 1..26: mol_type = other RNA
tgagtagaagtaatggatgccacttc

SEQ ID NO: 2768 - RNA, 26 nt, synthetic construct
  source 1..26: mol_type = other RNA
gagtagaagtaatggatgccacttcc

SEQ ID NO: 2769 - RNA, 26 nt, synthetic construct
  source 1..26: mol_type = other RNA
agtagaagtaatggatgccacttcca

SEQ ID NO: 2770 - RNA, 26 nt, synthetic construct
  source 1..26: mol_type = other RNA
gtagaagtaatggatgccacttccag

SEQ ID NO: 2771 - RNA, 26 nt, synthetic construct
  source 1..26: mol_type = other RNA
tagaagtaatggatgccacttccagg

SEQ ID NO: 2772 - RNA, 26 nt, synthetic construct
  source 1..26: mol_type = other RNA
agaagtaatggatgccacttccagga

SEQ ID NO: 2773 - RNA, 26 nt, synthetic construct
  source 1..26: mol_type = other RNA
gaagtaatggatgccacttccaggat

SEQ ID NO: 2774 - RNA, 26 nt, synthetic construct
  source 1..26: mol_type = other RNA
aagtaatggatgccacttccaggatt

SEQ ID NO: 2775 - RNA, 26 nt, synthetic construct
  source 1..26: mol_type = other RNA
agtaatggatgccacttccaggattg

SEQ ID NO: 2776 - RNA, 26 nt, synthetic construct
  source 1..26: mol_type = other RNA
gtaatggatgccacttccaggattgg

SEQ ID NO: 2777 - RNA, 26 nt, synthetic construct
  source 1..26: mol_type = other RNA
taatggatgccacttccaggattggc

SEQ ID NO: 2778 - RNA, 26 nt, synthetic construct
  source 1..26: mol_type = other RNA
aatggatgccacttccaggattggcc

SEQ ID NO: 2779 - RNA, 26 nt, synthetic construct
  source 1..26: mol_type = other RNA
atggatgccacttccaggattggccc

SEQ ID NO: 2780 - RNA, 26 nt, synthetic construct
  source 1..26: mol_type = other RNA
tggatgccacttccaggattggccca

SEQ ID NO: 2781 - RNA, 26 nt, synthetic construct
  source 1..26: mol_type = other RNA
ggatgccacttccaggattggcccac

SEQ ID NO: 2782 - RNA, 26 nt, synthetic construct
  source 1..26: mol_type = other RNA
gatgccacttccaggattggcccaca

SEQ ID NO: 2783 - RNA, 26 nt, synthetic construct
  source 1..26: mol_type = other RNA
atgccacttccaggattggcccacag

SEQ ID NO: 2784 - RNA, 26 nt, synthetic construct
  source 1..26: mol_type = other RNA
tgccacttccaggattggcccacagg

SEQ ID NO: 2785 - RNA, 26 nt, synthetic construct
  source 1..26: mol_type = other RNA
gccacttccaggattggcccacagga

SEQ ID NO: 2786 - RNA, 26 nt, synthetic construct
  source 1..26: mol_type = other RNA
ccacttccaggattggcccacaggaa

SEQ ID NO: 2787 - RNA, 26 nt, synthetic construct
  source 1..26: mol_type = other RNA
cacttccaggattggcccacaggaac

SEQ ID NO: 2788 - RNA, 26 nt, synthetic construct
  source 1..26: mol_type = other RNA
acttccaggattggcccacaggaact

SEQ ID NO: 2789 - RNA, 26 nt, synthetic construct
  source 1..26: mol_type = other RNA
cttccaggattggcccacaggaactt

SEQ ID NO: 2790 - RNA, 26 nt, synthetic construct
  source 1..26: mol_type = other RNA
ttccaggattggcccacaggaacttt

SEQ ID NO: 2791 - RNA, 26 nt, synthetic construct
  source 1..26: mol_type = other RNA
tccaggattggcccacaggaactttc

SEQ ID NO: 2792 - RNA, 26 nt, synthetic construct
  source 1..26: mol_type = other RNA
ccaggattggcccacaggaactttcc

SEQ ID NO: 2793 - RNA, 26 nt, synthetic construct
  source 1..26: mol_type = other RNA
caggattggcccacaggaactttcca

SEQ ID NO: 2794 - RNA, 26 nt, synthetic construct
  source 1..26: mol_type = other RNA
aggattggcccacaggaactttccat

SEQ ID NO: 2795 - RNA, 26 nt, synthetic construct
  source 1..26: mol_type = other RNA
ggattggcccacaggaactttccata

SEQ ID NO: 2796 - RNA, 26 nt, synthetic construct
  source 1..26: mol_type = other RNA
gattggcccacaggaactttccatac

SEQ ID NO: 2797 - RNA, 26 nt, synthetic construct
  source 1..26: mol_type = other RNA
attggcccacaggaactttccataca

SEQ ID NO: 2798 - RNA, 26 nt, synthetic construct
  source 1..26: mol_type = other RNA
ttggcccacaggaactttccatacaa

SEQ ID NO: 2799 - RNA, 26 nt, synthetic construct
  source 1..26: mol_type = other RNA
tggcccacaggaactttccatacaaa

SEQ ID NO: 2800 - RNA, 26 nt, synthetic construct
  source 1..26: mol_type = other RNA
ggcccacaggaactttccatacaaaa

SEQ ID NO: 2801 - RNA, 26 nt, synthetic construct
  source 1..26: mol_type = other RNA
gcccacaggaactttccatacaaaat

SEQ ID NO: 2802 - RNA, 26 nt, synthetic construct
  source 1..26: mol_type = other RNA
cccacaggaactttccatacaaaatg

SEQ ID NO: 2803 - RNA, 26 nt, synthetic construct
  source 1..26: mol_type = other RNA
ccacaggaactttccatacaaaatgc

SEQ ID NO: 2804 - RNA, 26 nt, synthetic construct
  source 1..26: mol_type = other RNA
cacaggaactttccatacaaaatgct

SEQ ID NO: 2805 - RNA, 26 nt, synthetic construct
  source 1..26: mol_type = other RNA
acaggaactttccatacaaaatgctc

SEQ ID NO: 2806 - RNA, 26 nt, synthetic construct
  source 1..26: mol_type = other RNA
caggaactttccatacaaaatgctcc

SEQ ID NO: 2807 - RNA, 20 nt, synthetic construct
  source 1..20: mol_type = other RNA
aaaaagcaatgactgaacta

SEQ ID NO: 2808 - RNA, 20 nt, synthetic construct
  source 1..20: mol_type = other RNA
ttcccagaaaaaaagcaatg

SEQ ID NO: 2809 - RNA, 20 nt, synthetic construct
  source 1..20: mol_type = other RNA
gagttttcccagaaaaaaag

SEQ ID NO: 2810 - RNA, 20 nt, synthetic construct
  source 1..20: mol_type = other RNA
gcagaagtcagagttttccc

SEQ ID NO: 2811 - RNA, 20 nt, synthetic construct
  source 1..20: mol_type = other RNA
atcccttctgcagaagtcag

SEQ ID NO: 2812 - RNA, 20 nt, synthetic construct
  source 1..20: mol_type = other RNA
gccccatcccttctgcagaa

SEQ ID NO: 2813 - RNA, 20 nt, synthetic construct
  source 1..20: mol_type = other RNA
atgacggccccatcccttct

SEQ ID NO: 2814 - RNA, 20 nt, synthetic construct
  source 1..20: mol_type = other RNA
atgtccagatgacggcccca

SEQ ID NO: 2815 - RNA, 20 nt, synthetic construct
  source 1..20: mol_type = other RNA
actttgcttgtgatgtccag

SEQ ID NO: 2816 - RNA, 20 nt, synthetic construct
  source 1..20: mol_type = other RNA
cagaaactttgcttgtgatg

SEQ ID NO: 2817 - RNA, 20 nt, synthetic construct
  source 1..20: mol_type = other RNA
ttgaatccacagaaactttg

SEQ ID NO: 2818 - RNA, 20 nt, synthetic construct
  source 1..20: mol_type = other RNA
taatgggctttgaatccaca

SEQ ID NO: 2819 - RNA, 20 nt, synthetic construct
  source 1..20: mol_type = other RNA
gttcttaatgggctttgaat

SEQ ID NO: 2820 - RNA, 20 nt, synthetic construct
  source 1..20: mol_type = other RNA
agcaagttcttaatgggctt

SEQ ID NO: 2821 - RNA, 20 nt, synthetic construct
  source 1..20: mol_type = other RNA
gttaggataaagcaagttct

SEQ ID NO: 2822 - RNA, 20 nt, synthetic construct
  source 1..20: mol_type = other RNA
ggtctgtgttaggataaagc

SEQ ID NO: 2823 - RNA, 20 nt, synthetic construct
  source 1..20: mol_type = other RNA
agggctggtctgtgttagga

SEQ ID NO: 2824 - RNA, 20 nt, synthetic construct
  source 1..20: mol_type = other RNA
catgacacagggctggtctg

SEQ ID NO: 2825 - RNA, 20 nt, synthetic construct
  source 1..20: mol_type = other RNA
aggtaccatgacacagggct

SEQ ID NO: 2826 - RNA, 20 nt, synthetic construct
  source 1..20: mol_type = other RNA
gcaggagcatcaggtaccat

SEQ ID NO: 2827 - RNA, 20 nt, synthetic construct
  source 1..20: mol_type = other RNA
actgagcaggagcatcaggt

SEQ ID NO: 2828 - RNA, 20 nt, synthetic construct
  source 1..20: mol_type = other RNA
ggcacaccactgagcaggag

SEQ ID NO: 2829 - RNA, 20 nt, synthetic construct
  source 1..20: mol_type = other RNA
gacattcagggcacaccact

SEQ ID NO: 2830 - RNA, 20 nt, synthetic construct
  source 1..20: mol_type = other RNA
ggttcaggacattcagggca

SEQ ID NO: 2831 - RNA, 20 nt, synthetic construct
  source 1..20: mol_type = other RNA
tacctccaggttcaggacat

SEQ ID NO: 2832 - RNA, 20 nt, synthetic construct
  source 1..20: mol_type = other RNA
gtggatctacctccaggttc

SEQ ID NO: 2833 - RNA, 20 nt, synthetic construct
  source 1..20: mol_type = other RNA
gatagggtggatctacctcc

SEQ ID NO: 2834 - RNA, 20 nt, synthetic construct
  source 1..20: mol_type = other RNA
agagctgggatagggtggat

SEQ ID NO: 2835 - RNA, 20 nt, synthetic construct
  source 1..20: mol_type = other RNA
agccagatgaggcagagagc

SEQ ID NO: 2836 - RNA, 20 nt, synthetic construct
  source 1..20: mol_type = other RNA
ttgggagagccagatgaggc

SEQ ID NO: 2837 - RNA, 20 nt, synthetic construct
  source 1..20: mol_type = other RNA
agccagcttttgggagagcc

SEQ ID NO: 2838 - RNA, 20 nt, synthetic construct
  source 1..20: mol_type = other RNA
gtgatagccagcttttggga

SEQ ID NO: 2839 - RNA, 20 nt, synthetic construct
  source 1..20: mol_type = other RNA
gggatcagtgatagccagct

SEQ ID NO: 2840 - RNA, 20 nt, synthetic construct
  source 1..20: mol_type = other RNA
caaaggggatcagtgatagc

SEQ ID NO: 2841 - RNA, 20 nt, synthetic construct
  source 1..20: mol_type = other RNA
gcactgagccaaaggggatc

SEQ ID NO: 2842 - RNA, 20 nt, synthetic construct
  source 1..20: mol_type = other RNA
aactaggcactgagccaaag

SEQ ID NO: 2843 - RNA, 20 nt, synthetic construct
  source 1..20: mol_type = other RNA
tacccagacatgatgtggag

SEQ ID NO: 2844 - RNA, 20 nt, synthetic construct
  source 1..20: mol_type = other RNA
tccaggagccctacccagac

SEQ ID NO: 2845 - RNA, 20 nt, synthetic construct
  source 1..20: mol_type = other RNA
ggaattccaggagccctacc

SEQ ID NO: 2846 - RNA, 20 nt, synthetic construct
  source 1..20: mol_type = other RNA
ctgaaggaattccaggagcc

SEQ ID NO: 2847 - RNA, 20 nt, synthetic construct
  source 1..20: mol_type = other RNA
gtgaggcctgaaggaattcc

SEQ ID NO: 2848 - RNA, 20 nt, synthetic construct
  source 1..20: mol_type = other RNA
cccacaagtgaggcctgaag

SEQ ID NO: 2849 - RNA, 20 nt, synthetic construct
  source 1..20: mol_type = other RNA
ttttactctaaatggcccac

SEQ ID NO: 2850 - RNA, 20 nt, synthetic construct
  source 1..20: mol_type = other RNA
gcccactattttactctaaa

SEQ ID NO: 2851 - RNA, 20 nt, synthetic construct
  source 1..20: mol_type = other RNA
gttgtatgtgcccactattt

SEQ ID NO: 2852 - RNA, 20 nt, synthetic construct
  source 1..20: mol_type = other RNA
gaccataatgaagtgttgta

SEQ ID NO: 2853 - RNA, 20 nt, synthetic construct
  source 1..20: mol_type = other RNA
ttgaagaccataatgaagtg

SEQ ID NO: 2854 - RNA, 20 nt, synthetic construct
  source 1..20: mol_type = other RNA
catggtttgaagaccataat

SEQ ID NO: 2855 - RNA, 20 nt, synthetic construct
  source 1..20: mol_type = other RNA
ggaaacatggtttgaagacc

SEQ ID NO: 2856 - RNA, 20 nt, synthetic construct
  source 1..20: mol_type = other RNA
atcttaaaggaaacatggtt

SEQ ID NO: 2857 - RNA, 20 nt, synthetic construct
  source 1..20: mol_type = other RNA
cttaagatcatcttaaagga

SEQ ID NO: 2858 - RNA, 20 nt, synthetic construct
  source 1..20: mol_type = other RNA
tcgtccttaagatcatctta

SEQ ID NO: 2859 - RNA, 20 nt, synthetic construct
  source 1..20: mol_type = other RNA
tcttactttcgtccttaaga

SEQ ID NO: 2860 - RNA, 20 nt, synthetic construct
  source 1..20: mol_type = other RNA
cactatttcttactttcgtc

SEQ ID NO: 2861 - RNA, 20 nt, synthetic construct
  source 1..20: mol_type = other RNA
ctcaactcactatttcttac

SEQ ID NO: 2862 - RNA, 20 nt, synthetic construct
  source 1..20: mol_type = other RNA
ggacttactcaactcactat

SEQ ID NO: 2863 - RNA, 20 nt, synthetic construct
  source 1..20: mol_type = other RNA
ataatacattggacttactc

SEQ ID NO: 2864 - RNA, 20 nt, synthetic construct
  source 1..20: mol_type = other RNA
aacatttaataatacattgg

SEQ ID NO: 2865 - RNA, 20 nt, synthetic construct
  source 1..20: mol_type = other RNA
cagagggagcataaaacatt

SEQ ID NO: 2866 - RNA, 20 nt, synthetic construct
  source 1..20: mol_type = other RNA
gacaacttgctaggattgta

SEQ ID NO: 2867 - RNA, 20 nt, synthetic construct
  source 1..20: mol_type = other RNA
ataaatgacaacttgctagg

SEQ ID NO: 2868 - RNA, 20 nt, synthetic construct
  source 1..20: mol_type = other RNA
taactataaatgacaacttg

SEQ ID NO: 2869 - RNA, 20 nt, synthetic construct
  source 1..20: mol_type = other RNA
tttagataactataaatgac

SEQ ID NO: 2870 - RNA, 20 nt, synthetic construct
  source 1..20: mol_type = other RNA
gtatttcatttagataacta

SEQ ID NO: 2871 - RNA, 20 nt, synthetic construct
  source 1..20: mol_type = other RNA
tcaatgtatttcatttagat

SEQ ID NO: 2872 - RNA, 20 nt, synthetic construct
  source 1..20: mol_type = other RNA
ggagatcaatgtatttcatt

SEQ ID NO: 2873 - RNA, 20 nt, synthetic construct
  source 1..20: mol_type = other RNA
gctgtggagatcaatgtatt

SEQ ID NO: 2874 - RNA, 20 nt, synthetic construct
  source 1..20: mol_type = other RNA
tactgagtgctgtggagatc

SEQ ID NO: 2875 - RNA, 20 nt, synthetic construct
  source 1..20: mol_type = other RNA
aaccaagtactgagtgctgt

SEQ ID NO: 2876 - RNA, 20 nt, synthetic construct
  source 1..20: mol_type = other RNA
attctaaccaagtactgagt

SEQ ID NO: 2877 - RNA, 20 nt, synthetic construct
  source 1..20: mol_type = other RNA
tataaattctaaccaagtac

SEQ ID NO: 2878 - RNA, 20 nt, synthetic construct
  source 1..20: mol_type = other RNA
agaaccaaaaatataaattc

SEQ ID NO: 2879 - RNA, 20 nt, synthetic construct
  source 1..20: mol_type = other RNA
attagagggagaaccaaaaa

SEQ ID NO: 2880 - RNA, 20 nt, synthetic construct
  source 1..20: mol_type = other RNA
tcctcattagagggagaacc

SEQ ID NO: 2881 - RNA, 20 nt, synthetic construct
  source 1..20: mol_type = other RNA
gctggttttcctcattagag

SEQ ID NO: 2882 - RNA, 20 nt, synthetic construct
  source 1..20: mol_type = other RNA
tattttttgtgctggttttc

SEQ ID NO: 2883 - RNA, 20 nt, synthetic construct
  source 1..20: mol_type = other RNA
gtccatattttttgtgctgg

SEQ ID NO: 2884 - RNA, 20 nt, synthetic construct
  source 1..20: mol_type = other RNA
aatgaagtccatattttttg

SEQ ID NO: 2885 - RNA, 20 nt, synthetic construct
  source 1..20: mol_type = other RNA
agatttgcttatgaatgaag

SEQ ID NO: 2886 - RNA, 20 nt, synthetic construct
  source 1..20: mol_type = other RNA
aacatcagaaaagatttgct

SEQ ID NO: 2887 - RNA, 20 nt, synthetic construct
  source 1..20: mol_type = other RNA
ccgcactcaaaaacatcaga

SEQ ID NO: 2888 - RNA, 20 nt, synthetic construct
  source 1..20: mol_type = other RNA
gaactaccgcactcaaaaac

SEQ ID NO: 2889 - RNA, 20 nt, synthetic construct
  source 1..20: mol_type = other RNA
ggaaagacaagaactaccgc

SEQ ID NO: 2890 - RNA, 20 nt, synthetic construct
  source 1..20: mol_type = other RNA
ttcagggaaagacaagaact

SEQ ID NO: 2891 - RNA, 20 nt, synthetic construct
  source 1..20: mol_type = other RNA
gagccttcagggaaagacaa

SEQ ID NO: 2892 - RNA, 20 nt, synthetic construct
  source 1..20: mol_type = other RNA
aataatgagccttcagggaa

SEQ ID NO: 2893 - RNA, 20 nt, synthetic construct
  source 1..20: mol_type = other RNA
tgcacaataatgagccttca

SEQ ID NO: 2894 - RNA, 20 nt, synthetic construct
  source 1..20: mol_type = other RNA
taactttatgcacaataatg

SEQ ID NO: 2895 - RNA, 20 nt, synthetic construct
  source 1..20: mol_type = other RNA
atttttataactttatgcac

SEQ ID NO: 2896 - RNA, 20 nt, synthetic construct
  source 1..20: mol_type = other RNA
ggtacccttataatttttat

SEQ ID NO: 2897 - RNA, 20 nt, synthetic construct
  source 1..20: mol_type = other RNA
attataaaggtacccttata

SEQ ID NO: 2898 - RNA, 20 nt, synthetic construct
  source 1..20: mol_type = other RNA
tcatttggcaattataaagg

SEQ ID NO: 2899 - RNA, 20 nt, synthetic construct
  source 1..20: mol_type = other RNA
ttcttttcatttggcaatta

SEQ ID NO: 2900 - RNA, 20 nt, synthetic construct
  source 1..20: mol_type = other RNA
cctatttcttttcatttggc

SEQ ID NO: 2901 - RNA, 20 nt, synthetic construct
  source 1..20: mol_type = other RNA
ctttatttatttcacctatt

SEQ ID NO: 2902 - RNA, 20 nt, synthetic construct
  source 1..20: mol_type = other RNA
gattcctcttctttatttat

SEQ ID NO: 2903 - RNA, 20 nt, synthetic construct
  source 1..20: mol_type = other RNA
ctctctgattcctcttcttt

SEQ ID NO: 2904 - RNA, 20 nt, synthetic construct
  source 1..20: mol_type = other RNA
gaattctctctgattcctct

SEQ ID NO: 2905 - RNA, 20 nt, synthetic construct
  source 1..20: mol_type = other RNA
gtagcagaattctctctgat

SEQ ID NO: 2906 - RNA, 20 nt, synthetic construct
  source 1..20: mol_type = other RNA
ttgttctgtagcagaattct

SEQ ID NO: 2907 - RNA, 20 nt, synthetic construct
  source 1..20: mol_type = other RNA
ttgacttttgttctgtagca

SEQ ID NO: 2908 - RNA, 20 nt, synthetic construct
  source 1..20: mol_type = other RNA
cttataattgacttttgttc

SEQ ID NO: 2909 - RNA, 20 nt, synthetic construct
  source 1..20: mol_type = other RNA
gcacaattacttataattga

SEQ ID NO: 2910 - RNA, 20 nt, synthetic construct
  source 1..20: mol_type = other RNA
tgcaggcacaattacttata

SEQ ID NO: 2911 - RNA, 20 nt, synthetic construct
  source 1..20: mol_type = other RNA
tcaacactgcaggcacaatt

SEQ ID NO: 2912 - RNA, 20 nt, synthetic construct
  source 1..20: mol_type = other RNA
tgagtattcaacactgcagg

SEQ ID NO: 2913 - RNA, 20 nt, synthetic construct
  source 1..20: mol_type = other RNA
agttcaaatgagtattcaac

SEQ ID NO: 2914 - RNA, 20 nt, synthetic construct
  source 1..20: mol_type = other RNA
tctacagttcaaatgagtat

SEQ ID NO: 2915 - RNA, 20 nt, synthetic construct
  source 1..20: mol_type = other RNA
gataaattctacagttcaaa

SEQ ID NO: 2916 - RNA, 20 nt, synthetic construct
  source 1..20: mol_type = other RNA
cgagtgataaattctacagt

SEQ ID NO: 2917 - RNA, 20 nt, synthetic construct
  source 1..20: mol_type = other RNA
gacttgccccttgcgagtga

SEQ ID NO: 2918 - RNA, 20 nt, synthetic construct
  source 1..20: mol_type = other RNA
aggcagacttgccccttgcg

SEQ ID NO: 2919 - RNA, 20 nt, synthetic construct
  source 1..20: mol_type = other RNA
cccccaggcagacttgcccc

SEQ ID NO: 2920 - RNA, 20 nt, synthetic construct
  source 1..20: mol_type = other RNA
ccatacccccaggcagactt

SEQ ID NO: 2921 - RNA, 20 nt, synthetic construct
  source 1..20: mol_type = other RNA
aatctacccatacccccagg

SEQ ID NO: 2922 - RNA, 20 nt, synthetic construct
  source 1..20: mol_type = other RNA
catgaaaatccaatctaccc

SEQ ID NO: 2923 - RNA, 20 nt, synthetic construct
  source 1..20: mol_type = other RNA
caagacatgaaaatccaatc

SEQ ID NO: 2924 - RNA, 20 nt, synthetic construct
  source 1..20: mol_type = other RNA
taaagccaagacatgaaaat

SEQ ID NO: 2925 - RNA, 20 nt, synthetic construct
  source 1..20: mol_type = other RNA
ctggataaagccaagacatg

SEQ ID NO: 2926 - RNA, 20 nt, synthetic construct
  source 1..20: mol_type = other RNA
ggaggtgtcctggataaagc

SEQ ID NO: 2927 - RNA, 20 nt, synthetic construct
  source 1..20: mol_type = other RNA
taagaagggaggtgtcctgg

SEQ ID NO: 2928 - RNA, 20 nt, synthetic construct
  source 1..20: mol_type = other RNA
acatgactttaagaagggag

SEQ ID NO: 2929 - RNA, 20 nt, synthetic construct
  source 1..20: mol_type = other RNA
cgactgaaacatgactttaa

SEQ ID NO: 2930 - RNA, 20 nt, synthetic construct
  source 1..20: mol_type = other RNA
atagtttccacgactgaaac

SEQ ID NO: 2931 - RNA, 20 nt, synthetic construct
  source 1..20: mol_type = other RNA
aaggaatagtttccacgact

SEQ ID NO: 2932 - RNA, 18 nt, synthetic construct
  source 1..18: mol_type = other RNA
agccctacccagacatga

SEQ ID NO: 2933 - RNA, 18 nt, synthetic construct
  source 1..18: mol_type = other RNA
gccctacccagacatgat

SEQ ID NO: 2934 - RNA, 18 nt, synthetic construct
  source 1..18: mol_type = other RNA
ccctacccagacatgatg

SEQ ID NO: 2935 - RNA, 18 nt, synthetic construct
  source 1..18: mol_type = other RNA
cctacccagacatgatgt

SEQ ID NO: 2936 - RNA, 18 nt, synthetic construct
  source 1..18: mol_type = other RNA
tacccagacatgatgtgg

SEQ ID NO: 2937 - RNA, 18 nt, synthetic construct
  source 1..18: mol_type = other RNA
tggaggtggagcaaacta

SEQ ID NO: 2938 - RNA, 18 nt, synthetic construct
  source 1..18: mol_type = other RNA
gaggtggagcaaactagg

SEQ ID NO: 2939 - RNA, 18 nt, synthetic construct
  source 1..18: mol_type = other RNA
aggtggagcaaactaggc

SEQ ID NO: 2940 - RNA, 18 nt, synthetic construct
  source 1..18: mol_type = other RNA
ggtggagcaaactaggca

SEQ ID NO: 2941 - RNA, 18 nt, synthetic construct
  source 1..18: mol_type = other RNA
gtggagcaaactaggcac

SEQ ID NO: 2942 - RNA, 18 nt, synthetic construct
  source 1..18: mol_type = other RNA
tggagcaaactaggcact

SEQ ID NO: 2943 - RNA, 18 nt, synthetic construct
  source 1..18: mol_type = other RNA
ggagcaaactaggcactg

SEQ ID NO: 2944 - RNA, 18 nt, synthetic construct
  source 1..18: mol_type = other RNA
aactaggcactgagccaa

SEQ ID NO: 2945 - RNA, 18 nt, synthetic construct
  source 1..18: mol_type = other RNA
ggcactgagccaaagggg

SEQ ID NO: 2946 - RNA, 18 nt, synthetic construct
  source 1..18: mol_type = other RNA
agccaaaggggatcagtg

SEQ ID NO: 2947 - RNA, 18 nt, synthetic construct
  source 1..18: mol_type = other RNA
gccaaaggggatcagtga

SEQ ID NO: 2948 - RNA, 18 nt, synthetic construct
  source 1..18: mol_type = other RNA
aggggatcagtgatagcc

SEQ ID NO: 2949 - RNA, 19 nt, synthetic construct
  source 1..19: mol_type = other RNA
agccctacccagacatgat

SEQ ID NO: 2950 - RNA, 19 nt, synthetic construct
  source 1..19: mol_type = other RNA
gccctacccagacatgatg

SEQ ID NO: 2951 - RNA, 19 nt, synthetic construct
  source 1..19: mol_type = other RNA
ccctacccagacatgatgt

SEQ ID NO: 2952 - RNA, 19 nt, synthetic construct
  source 1..19: mol_type = other RNA
cctacccagacatgatgtg

SEQ ID NO: 2953 - RNA, 19 nt, synthetic construct
  source 1..19: mol_type = other RNA
ctacccagacatgatgtgg

SEQ ID NO: 2954 - RNA, 19 nt, synthetic construct
  source 1..19: mol_type = other RNA
tacccagacatgatgtgga

SEQ ID NO: 2955 - RNA, 19 nt, synthetic construct
  source 1..19: mol_type = other RNA
atgtggaggtggagcaaac

SEQ ID NO: 2956 - RNA, 19 nt, synthetic construct
  source 1..19: mol_type = other RNA
gtggaggtggagcaaacta

SEQ ID NO: 2957 - RNA, 19 nt, synthetic construct
  source 1..19: mol_type = other RNA
tggaggtggagcaaactag

SEQ ID NO: 2958 - RNA, 19 nt, synthetic construct
  source 1..19: mol_type = other RNA
ggaggtggagcaaactagg

SEQ ID NO: 2959 - RNA, 19 nt, synthetic construct
  source 1..19: mol_type = other RNA
gaggtggagcaaactaggc

SEQ ID NO: 2960 - RNA, 19 nt, synthetic construct
  source 1..19: mol_type = other RNA
aggtggagcaaactaggca

SEQ ID NO: 2961 - RNA, 19 nt, synthetic construct
  source 1..19: mol_type = other RNA
ggtggagcaaactaggcac

SEQ ID NO: 2962 - RNA, 19 nt, synthetic construct
  source 1..19: mol_type = other RNA
gtggagcaaactaggcact

SEQ ID NO: 2963 - RNA, 19 nt, synthetic construct
  source 1..19: mol_type = other RNA
tggagcaaactaggcactg

SEQ ID NO: 2964 - RNA, 19 nt, synthetic construct
  source 1..19: mol_type = other RNA
ggagcaaactaggcactga

SEQ ID NO: 2965 - RNA, 19 nt, synthetic construct
  source 1..19: mol_type = other RNA
gagcaaactaggcactgag

SEQ ID NO: 2966 - RNA, 19 nt, synthetic construct
  source 1..19: mol_type = other RNA
agcaaactaggcactgagc

SEQ ID NO: 2967 - RNA, 19 nt, synthetic construct
  source 1..19: mol_type = other RNA
gcaaactaggcactgagcc

SEQ ID NO: 2968 - RNA, 19 nt, synthetic construct
  source 1..19: mol_type = other RNA
caaactaggcactgagcca

SEQ ID NO: 2969 - RNA, 19 nt, synthetic construct
  source 1..19: mol_type = other RNA
aaactaggcactgagccaa

SEQ ID NO: 2970 - RNA, 19 nt, synthetic construct
  source 1..19: mol_type = other RNA
aactaggcactgagccaaa

SEQ ID NO: 2971 - RNA, 19 nt, synthetic construct
  source 1..19: mol_type = other RNA
aggcactgagccaaagggg

SEQ ID NO: 2972 - RNA, 19 nt, synthetic construct
  source 1..19: mol_type = other RNA
ggcactgagccaaagggga

SEQ ID NO: 2973 - RNA, 19 nt, synthetic construct
  source 1..19: mol_type = other RNA
gcactgagccaaaggggat

SEQ ID NO: 2974 - RNA, 19 nt, synthetic construct
  source 1..19: mol_type = other RNA
ctgagccaaaggggatcag

SEQ ID NO: 2975 - RNA, 19 nt, synthetic construct
  source 1..19: mol_type = other RNA
tgagccaaaggggatcagt

SEQ ID NO: 2976 - RNA, 19 nt, synthetic construct
  source 1..19: mol_type = other RNA
gagccaaaggggatcagtg

SEQ ID NO: 2977 - RNA, 19 nt, synthetic construct
  source 1..19: mol_type = other RNA
agccaaaggggatcagtga

SEQ ID NO: 2978 - RNA, 19 nt, synthetic construct
  source 1..19: mol_type = other RNA
gccaaaggggatcagtgat

SEQ ID NO: 2979 - RNA, 19 nt, synthetic construct
  source 1..19: mol_type = other RNA
caaaggggatcagtgatag

SEQ ID NO: 2980 - RNA, 19 nt, synthetic construct
  source 1..19: mol_type = other RNA
aaaggggatcagtgatagc

SEQ ID NO: 2981 - RNA, 19 nt, synthetic construct
  source 1..19: mol_type = other RNA
aaggggatcagtgatagcc

SEQ ID NO: 2982 - RNA, 19 nt, synthetic construct
  source 1..19: mol_type = other RNA
aggggatcagtgatagcca

SEQ ID NO: 2983 - RNA, 20 nt, synthetic construct
  source 1..20: mol_type = other RNA
agccctacccagacatgatg

SEQ ID NO: 2984 - RNA, 20 nt, synthetic construct
  source 1..20: mol_type = other RNA
gccctacccagacatgatgt

SEQ ID NO: 2985 - RNA, 20 nt, synthetic construct
  source 1..20: mol_type = other RNA
ccctacccagacatgatgtg

SEQ ID NO: 2986 - RNA, 20 nt, synthetic construct
  source 1..20: mol_type = other RNA
cctacccagacatgatgtgg

SEQ ID NO: 2987 - RNA, 20 nt, synthetic construct
  source 1..20: mol_type = other RNA
ctacccagacatgatgtgga

SEQ ID NO: 2988 - RNA, 20 nt, synthetic construct
  source 1..20: mol_type = other RNA
cccagacatgatgtggaggt

SEQ ID NO: 2989 - RNA, 20 nt, synthetic construct
  source 1..20: mol_type = other RNA
cagacatgatgtggaggtgg

SEQ ID NO: 2990 - RNA, 20 nt, synthetic construct
  source 1..20: mol_type = other RNA
atgatgtggaggtggagcaa

SEQ ID NO: 2991 - RNA, 20 nt, synthetic construct
  source 1..20: mol_type = other RNA
tgatgtggaggtggagcaaa

SEQ ID NO: 2992 - RNA, 20 nt, synthetic construct
  source 1..20: mol_type = other RNA
gatgtggaggtggagcaaac

SEQ ID NO: 2993 - RNA, 20 nt, synthetic construct
  source 1..20: mol_type = other RNA
atgtggaggtggagcaaact

SEQ ID NO: 2994 - RNA, 20 nt, synthetic construct
  source 1..20: mol_type = other RNA
tgtggaggtggagcaaacta

SEQ ID NO: 2995 - RNA, 20 nt, synthetic construct
  source 1..20: mol_type = other RNA
gtggaggtggagcaaactag

SEQ ID NO: 2996 - RNA, 20 nt, synthetic construct
  source 1..20: mol_type = other RNA
tggaggtggagcaaactagg

SEQ ID NO: 2997 - RNA, 20 nt, synthetic construct
  source 1..20: mol_type = other RNA
ggaggtggagcaaactaggc

SEQ ID NO: 2998 - RNA, 20 nt, synthetic construct
  source 1..20: mol_type = other RNA
gaggtggagcaaactaggca

SEQ ID NO: 2999 - RNA, 20 nt, synthetic construct
  source 1..20: mol_type = other RNA
aggtggagcaaactaggcac

SEQ ID NO: 3000 - RNA, 20 nt, synthetic construct
  source 1..20: mol_type = other RNA
ggtggagcaaactaggcact

SEQ ID NO: 3001 - RNA, 20 nt, synthetic construct
  source 1..20: mol_type = other RNA
gtggagcaaactaggcactg

SEQ ID NO: 3002 - RNA, 20 nt, synthetic construct
  source 1..20: mol_type = other RNA
tggagcaaactaggcactga

SEQ ID NO: 3003 - RNA, 20 nt, synthetic construct
  source 1..20: mol_type = other RNA
ggagcaaactaggcactgag

SEQ ID NO: 3004 - RNA, 20 nt, synthetic construct
  source 1..20: mol_type = other RNA
gagcaaactaggcactgagc

SEQ ID NO: 3005 - RNA, 20 nt, synthetic construct
  source 1..20: mol_type = other RNA
agcaaactaggcactgagcc

SEQ ID NO: 3006 - RNA, 20 nt, synthetic construct
  source 1..20: mol_type = other RNA
gcaaactaggcactgagcca

SEQ ID NO: 3007 - RNA, 20 nt, synthetic construct
  source 1..20: mol_type = other RNA
caaactaggcactgagccaa

SEQ ID NO: 3008 - RNA, 20 nt, synthetic construct
  source 1..20: mol_type = other RNA
aaactaggcactgagccaaa

SEQ ID NO: 3009 - RNA, 20 nt, synthetic construct
  source 1..20: mol_type = other RNA
taggcactgagccaaagggg

SEQ ID NO: 3010 - RNA, 20 nt, synthetic construct
  source 1..20: mol_type = other RNA
aggcactgagccaaagggga

SEQ ID NO: 3011 - RNA, 20 nt, synthetic construct
  source 1..20: mol_type = other RNA
ggcactgagccaaaggggat

SEQ ID NO: 3012 - RNA, 20 nt, synthetic construct
  source 1..20: mol_type = other RNA
cactgagccaaaggggatca

SEQ ID NO: 3013 - RNA, 20 nt, synthetic construct
  source 1..20: mol_type = other RNA
actgagccaaaggggatcag

SEQ ID NO: 3014 - RNA, 20 nt, synthetic construct
  source 1..20: mol_type = other RNA
ctgagccaaaggggatcagt

SEQ ID NO: 3015 - RNA, 20 nt, synthetic construct
  source 1..20: mol_type = other RNA
tgagccaaaggggatcagtg

SEQ ID NO: 3016 - RNA, 20 nt, synthetic construct
  source 1..20: mol_type = other RNA
gagccaaaggggatcagtga

SEQ ID NO: 3017 - RNA, 20 nt, synthetic construct
  source 1..20: mol_type = other RNA
agccaaaggggatcagtgat

SEQ ID NO: 3018 - RNA, 20 nt, synthetic construct
  source 1..20: mol_type = other RNA
gccaaaggggatcagtgata

SEQ ID NO: 3019 - RNA, 20 nt, synthetic construct
  source 1..20: mol_type = other RNA
ccaaaggggatcagtgatag

SEQ ID NO: 3020 - RNA, 20 nt, synthetic construct
  source 1..20: mol_type = other RNA
aaaggggatcagtgatagcc

SEQ ID NO: 3021 - RNA, 20 nt, synthetic construct
  source 1..20: mol_type = other RNA
aaggggatcagtgatagcca

SEQ ID NO: 3022 - RNA, 21 nt, synthetic construct
  source 1..21: mol_type = other RNA
agccctacccagacatgatgt

SEQ ID NO: 3023 - RNA, 21 nt, synthetic construct
  source 1..21: mol_type = other RNA
gccctacccagacatgatgtg

SEQ ID NO: 3024 - RNA, 21 nt, synthetic construct
  source 1..21: mol_type = other RNA
ccctacccagacatgatgtgg

SEQ ID NO: 3025 - RNA, 21 nt, synthetic construct
  source 1..21: mol_type = other RNA
cctacccagacatgatgtgga

SEQ ID NO: 3026 - RNA, 21 nt, synthetic construct
  source 1..21: mol_type = other RNA
ctacccagacatgatgtggag

SEQ ID NO: 3027 - RNA, 21 nt, synthetic construct
  source 1..21: mol_type = other RNA
tacccagacatgatgtggagg

SEQ ID NO: 3028 - RNA, 21 nt, synthetic construct
  source 1..21: mol_type = other RNA
acccagacatgatgtggaggt

SEQ ID NO: 3029 - RNA, 21 nt, synthetic construct
  source 1..21: mol_type = other RNA
cccagacatgatgtggaggtg

SEQ ID NO: 3030 - RNA, 21 nt, synthetic construct
  source 1..21: mol_type = other RNA
ccagacatgatgtggaggtgg

SEQ ID NO: 3031 - RNA, 21 nt, synthetic construct
  source 1..21: mol_type = other RNA
cagacatgatgtggaggtgga

SEQ ID NO: 3032 - RNA, 21 nt, synthetic construct
  source 1..21: mol_type = other RNA
catgatgtggaggtggagcaa

SEQ ID NO: 3033 - RNA, 21 nt, synthetic construct
  source 1..21: mol_type = other RNA
atgatgtggaggtggagcaaa

SEQ ID NO: 3034 - RNA, 21 nt, synthetic construct
  source 1..21: mol_type = other RNA
tgatgtggaggtggagcaaac

SEQ ID NO: 3035 - RNA, 21 nt, synthetic construct
  source 1..21: mol_type = other RNA
gatgtggaggtggagcaaact

SEQ ID NO: 3036 - RNA, 21 nt, synthetic construct
  source 1..21: mol_type = other RNA
atgtggaggtggagcaaacta

SEQ ID NO: 3037 - RNA, 21 nt, synthetic construct
  source 1..21: mol_type = other RNA
tgtggaggtggagcaaactag

SEQ ID NO: 3038 - RNA, 21 nt, synthetic construct
  source 1..21: mol_type = other RNA
gtggaggtggagcaaactagg

SEQ ID NO: 3039 - RNA, 21 nt, synthetic construct
  source 1..21: mol_type = other RNA
tggaggtggagcaaactaggc

SEQ ID NO: 3040 - RNA, 21 nt, synthetic construct
  source 1..21: mol_type = other RNA
ggaggtggagcaaactaggca

SEQ ID NO: 3041 - RNA, 21 nt, synthetic construct
  source 1..21: mol_type = other RNA
gaggtggagcaaactaggcac

SEQ ID NO: 3042 - RNA, 21 nt, synthetic construct
  source 1..21: mol_type = other RNA
aggtggagcaaactaggcact

SEQ ID NO: 3043 - RNA, 21 nt, synthetic construct
  source 1..21: mol_type = other RNA
ggtggagcaaactaggcactg

SEQ ID NO: 3044 - RNA, 21 nt, synthetic construct
  source 1..21: mol_type = other RNA
gtggagcaaactaggcactga

SEQ ID NO: 3045 - RNA, 21 nt, synthetic construct
  source 1..21: mol_type = other RNA
tggagcaaactaggcactgag

SEQ ID NO: 3046 - RNA, 21 nt, synthetic construct
  source 1..21: mol_type = other RNA
ggagcaaactaggcactgagc

SEQ ID NO: 3047 - RNA, 21 nt, synthetic construct
  source 1..21: mol_type = other RNA
gagcaaactaggcactgagcc

SEQ ID NO: 3048 - RNA, 21 nt, synthetic construct
  source 1..21: mol_type = other RNA
agcaaactaggcactgagcca

SEQ ID NO: 3049 - RNA, 21 nt, synthetic construct
  source 1..21: mol_type = other RNA
gcaaactaggcactgagccaa

SEQ ID NO: 3050 - RNA, 21 nt, synthetic construct
  source 1..21: mol_type = other RNA
caaactaggcactgagccaaa

SEQ ID NO: 3051 - RNA, 21 nt, synthetic construct
  source 1..21: mol_type = other RNA
aaactaggcactgagccaaag

SEQ ID NO: 3052 - RNA, 21 nt, synthetic construct
  source 1..21: mol_type = other RNA
aactaggcactgagccaaagg

SEQ ID NO: 3053 - RNA, 21 nt, synthetic construct
  source 1..21: mol_type = other RNA
actaggcactgagccaaaggg

SEQ ID NO: 3054 - RNA, 21 nt, synthetic construct
  source 1..21: mol_type = other RNA
ctaggcactgagccaaagggg

SEQ ID NO: 3055 - RNA, 21 nt, synthetic construct
  source 1..21: mol_type = other RNA
taggcactgagccaaagggga

SEQ ID NO: 3056 - RNA, 21 nt, synthetic construct
  source 1..21: mol_type = other RNA
aggcactgagccaaaggggat

SEQ ID NO: 3057 - RNA, 21 nt, synthetic construct
  source 1..21: mol_type = other RNA
ggcactgagccaaaggggatc

SEQ ID NO: 3058 - RNA, 21 nt, synthetic construct
  source 1..21: mol_type = other RNA
gcactgagccaaaggggatca

SEQ ID NO: 3059 - RNA, 21 nt, synthetic construct
  source 1..21: mol_type = other RNA
cactgagccaaaggggatcag

SEQ ID NO: 3060 - RNA, 21 nt, synthetic construct
  source 1..21: mol_type = other RNA
actgagccaaaggggatcagt

SEQ ID NO: 3061 - RNA, 21 nt, synthetic construct
  source 1..21: mol_type = other RNA
ctgagccaaaggggatcagtg

SEQ ID NO: 3062 - RNA, 21 nt, synthetic construct
  source 1..21: mol_type = other RNA
tgagccaaaggggatcagtga

SEQ ID NO: 3063 - RNA, 21 nt, synthetic construct
  source 1..21: mol_type = other RNA
gagccaaaggggatcagtgat

SEQ ID NO: 3064 - RNA, 21 nt, synthetic construct
  source 1..21: mol_type = other RNA
agccaaaggggatcagtgata

SEQ ID NO: 3065 - RNA, 21 nt, synthetic construct
  source 1..21: mol_type = other RNA
gccaaaggggatcagtgatag

SEQ ID NO: 3066 - RNA, 21 nt, synthetic construct
  source 1..21: mol_type = other RNA
ccaaaggggatcagtgatagc

SEQ ID NO: 3067 - RNA, 21 nt, synthetic construct
  source 1..21: mol_type = other RNA
caaaggggatcagtgatagcc

SEQ ID NO: 3068 - RNA, 21 nt, synthetic construct
  source 1..21: mol_type = other RNA
aaaggggatcagtgatagcca

SEQ ID NO: 3069 - RNA, 22 nt, synthetic construct
  source 1..22: mol_type = other RNA
agccctacccagacatgatgtg

SEQ ID NO: 3070 - RNA, 22 nt, synthetic construct
  source 1..22: mol_type = other RNA
gccctacccagacatgatgtgg

SEQ ID NO: 3071 - RNA, 22 nt, synthetic construct
  source 1..22: mol_type = other RNA
ccctacccagacatgatgtgga

SEQ ID NO: 3072 - RNA, 22 nt, synthetic construct
  source 1..22: mol_type = other RNA
cctacccagacatgatgtggag

SEQ ID NO: 3073 - RNA, 22 nt, synthetic construct
  source 1..22: mol_type = other RNA
ctacccagacatgatgtggagg

SEQ ID NO: 3074 - RNA, 22 nt, synthetic construct
  source 1..22: mol_type = other RNA
tacccagacatgatgtggaggt

SEQ ID NO: 3075 - RNA, 22 nt, synthetic construct
  source 1..22: mol_type = other RNA
acccagacatgatgtggaggtg

SEQ ID NO: 3076 - RNA, 22 nt, synthetic construct
  source 1..22: mol_type = other RNA
cccagacatgatgtggaggtgg

SEQ ID NO: 3077 - RNA, 22 nt, synthetic construct
  source 1..22: mol_type = other RNA
ccagacatgatgtggaggtgga

SEQ ID NO: 3078 - RNA, 22 nt, synthetic construct
  source 1..22: mol_type = other RNA
cagacatgatgtggaggtggag

SEQ ID NO: 3079 - RNA, 22 nt, synthetic construct
  source 1..22: mol_type = other RNA
agacatgatgtggaggtggagc

SEQ ID NO: 3080 - RNA, 22 nt, synthetic construct
  source 1..22: mol_type = other RNA
acatgatgtggaggtggagcaa

SEQ ID NO: 3081 - RNA, 22 nt, synthetic construct
  source 1..22: mol_type = other RNA
catgatgtggaggtggagcaaa

SEQ ID NO: 3082 - RNA, 22 nt, synthetic construct
  source 1..22: mol_type = other RNA
atgatgtggaggtggagcaaac

SEQ ID NO: 3083 - RNA, 22 nt, synthetic construct
  source 1..22: mol_type = other RNA
tgatgtggaggtggagcaaact

SEQ ID NO: 3084 - RNA, 22 nt, synthetic construct
  source 1..22: mol_type = other RNA
gatgtggaggtggagcaaacta

SEQ ID NO: 3085 - RNA, 22 nt, synthetic construct
  source 1..22: mol_type = other RNA
atgtggaggtggagcaaactag

SEQ ID NO: 3086 - RNA, 22 nt, synthetic construct
  source 1..22: mol_type = other RNA
tgtggaggtggagcaaactagg

SEQ ID NO: 3087 - RNA, 22 nt, synthetic construct
  source 1..22: mol_type = other RNA
gtggaggtggagcaaactaggc

SEQ ID NO: 3088 - RNA, 22 nt, synthetic construct
  source 1..22: mol_type = other RNA
tggaggtggagcaaactaggca

SEQ ID NO: 3089 - RNA, 22 nt, synthetic construct
  source 1..22: mol_type = other RNA
ggaggtggagcaaactaggcac

SEQ ID NO: 3090 - RNA, 22 nt, synthetic construct
  source 1..22: mol_type = other RNA
gaggtggagcaaactaggcact

SEQ ID NO: 3091 - RNA, 22 nt, synthetic construct
  source 1..22: mol_type = other RNA
aggtggagcaaactaggcactg

SEQ ID NO: 3092 - RNA, 22 nt, synthetic construct
  source 1..22: mol_type = other RNA
ggtggagcaaactaggcactga

SEQ ID NO: 3093 - RNA, 22 nt, synthetic construct
  source 1..22: mol_type = other RNA
gtggagcaaactaggcactgag

SEQ ID NO: 3094 - RNA, 22 nt, synthetic construct
  source 1..22: mol_type = other RNA
tggagcaaactaggcactgagc

SEQ ID NO: 3095 - RNA, 22 nt, synthetic construct
  source 1..22: mol_type = other RNA
ggagcaaactaggcactgagcc

SEQ ID NO: 3096 - RNA, 22 nt, synthetic construct
  source 1..22: mol_type = other RNA
gagcaaactaggcactgagcca

SEQ ID NO: 3097 - RNA, 22 nt, synthetic construct
  source 1..22: mol_type = other RNA
agcaaactaggcactgagccaa

SEQ ID NO: 3098 - RNA, 22 nt, synthetic construct
  source 1..22: mol_type = other RNA
gcaaactaggcactgagccaaa

SEQ ID NO: 3099 - RNA, 22 nt, synthetic construct
  source 1..22: mol_type = other RNA
caaactaggcactgagccaaag

SEQ ID NO: 3100 - RNA, 22 nt, synthetic construct
  source 1..22: mol_type = other RNA
aaactaggcactgagccaaagg

SEQ ID NO: 3101 - RNA, 22 nt, synthetic construct
  source 1..22: mol_type = other RNA
aactaggcactgagccaaaggg

SEQ ID NO: 3102 - RNA, 22 nt, synthetic construct
  source 1..22: mol_type = other RNA
actaggcactgagccaaagggg

SEQ ID NO: 3103 - RNA, 22 nt, synthetic construct
  source 1..22: mol_type = other RNA
ctaggcactgagccaaagggga

SEQ ID NO: 3104 - RNA, 22 nt, synthetic construct
  source 1..22: mol_type = other RNA
taggcactgagccaaaggggat

SEQ ID NO: 3105 - RNA, 22 nt, synthetic construct
  source 1..22: mol_type = other RNA
aggcactgagccaaaggggatc

SEQ ID NO: 3106 - RNA, 22 nt, synthetic construct
  source 1..22: mol_type = other RNA
ggcactgagccaaaggggatca

SEQ ID NO: 3107 - RNA, 22 nt, synthetic construct
  source 1..22: mol_type = other RNA
gcactgagccaaaggggatcag

SEQ ID NO: 3108 - RNA, 22 nt, synthetic construct
  source 1..22: mol_type = other RNA
cactgagccaaaggggatcagt

SEQ ID NO: 3109 - RNA, 22 nt, synthetic construct
  source 1..22: mol_type = other RNA
actgagccaaaggggatcagtg

SEQ ID NO: 3110 - RNA, 22 nt, synthetic construct
  source 1..22: mol_type = other RNA
ctgagccaaaggggatcagtga

SEQ ID NO: 3111 - RNA, 22 nt, synthetic construct
  source 1..22: mol_type = other RNA
tgagccaaaggggatcagtgat

SEQ ID NO: 3112 - RNA, 22 nt, synthetic construct
  source 1..22: mol_type = other RNA
gagccaaaggggatcagtgata

SEQ ID NO: 3113 - RNA, 22 nt, synthetic construct
  source 1..22: mol_type = other RNA
agccaaaggggatcagtgatag

SEQ ID NO: 3114 - RNA, 22 nt, synthetic construct
  source 1..22: mol_type = other RNA
gccaaaggggatcagtgatagc

SEQ ID NO: 3115 - RNA, 22 nt, synthetic construct
  source 1..22: mol_type = other RNA
ccaaaggggatcagtgatagcc

SEQ ID NO: 3116 - RNA, 22 nt, synthetic construct
  source 1..22: mol_type = other RNA
caaaggggatcagtgatagcca

SEQ ID NO: 3117 - RNA, 23 nt, synthetic construct
  source 1..23: mol_type = other RNA
agccctacccagacatgatgtgg

SEQ ID NO: 3118 - RNA, 23 nt, synthetic construct
  source 1..23: mol_type = other RNA
gccctacccagacatgatgtgga

SEQ ID NO: 3119 - RNA, 23 nt, synthetic construct
  source 1..23: mol_type = other RNA
ccctacccagacatgatgtggag

SEQ ID NO: 3120 - RNA, 23 nt, synthetic construct
  source 1..23: mol_type = other RNA
cctacccagacatgatgtggagg

SEQ ID NO: 3121 - RNA, 23 nt, synthetic construct
  source 1..23: mol_type = other RNA
ctacccagacatgatgtggaggt

SEQ ID NO: 3122 - RNA, 23 nt, synthetic construct
  source 1..23: mol_type = other RNA
tacccagacatgatgtggaggtg

SEQ ID NO: 3123 - RNA, 23 nt, synthetic construct
  source 1..23: mol_type = other RNA
acccagacatgatgtggaggtgg

SEQ ID NO: 3124 - RNA, 23 nt, synthetic construct
  source 1..23: mol_type = other RNA
cccagacatgatgtggaggtgga

SEQ ID NO: 3125 - RNA, 23 nt, synthetic construct
  source 1..23: mol_type = other RNA
ccagacatgatgtggaggtggag

SEQ ID NO: 3126 - RNA, 23 nt, synthetic construct
  source 1..23: mol_type = other RNA
cagacatgatgtggaggtggagc

SEQ ID NO: 3127 - RNA, 23 nt, synthetic construct
  source 1..23: mol_type = other RNA
agacatgatgtggaggtggagca

SEQ ID NO: 3128 - RNA, 23 nt, synthetic construct
  source 1..23: mol_type = other RNA
gacatgatgtggaggtggagcaa

SEQ ID NO: 3129 - RNA, 23 nt, synthetic construct
  source 1..23: mol_type = other RNA
acatgatgtggaggtggagcaaa

SEQ ID NO: 3130 - RNA, 23 nt, synthetic construct
  source 1..23: mol_type = other RNA
catgatgtggaggtggagcaaac

SEQ ID NO: 3131 - RNA, 23 nt, synthetic construct
  source 1..23: mol_type = other RNA
atgatgtggaggtggagcaaact

SEQ ID NO: 3132 - RNA, 23 nt, synthetic construct
  source 1..23: mol_type = other RNA
tgatgtggaggtggagcaaacta

SEQ ID NO: 3133 - RNA, 23 nt, synthetic construct
  source 1..23: mol_type = other RNA
gatgtggaggtggagcaaactag

SEQ ID NO: 3134 - RNA, 23 nt, synthetic construct
  source 1..23: mol_type = other RNA
atgtggaggtggagcaaactagg

SEQ ID NO: 3135 - RNA, 23 nt, synthetic construct
  source 1..23: mol_type = other RNA
tgtggaggtggagcaaactaggc

SEQ ID NO: 3136 - RNA, 23 nt, synthetic construct
  source 1..23: mol_type = other RNA
gtggaggtggagcaaactaggca

SEQ ID NO: 3137 - RNA, 23 nt, synthetic construct
  source 1..23: mol_type = other RNA
tggaggtggagcaaactaggcac

SEQ ID NO: 3138 - RNA, 23 nt, synthetic construct
  source 1..23: mol_type = other RNA
ggaggtggagcaaactaggcact

SEQ ID NO: 3139 - RNA, 23 nt, synthetic construct
  source 1..23: mol_type = other RNA
gaggtggagcaaactaggcactg

SEQ ID NO: 3140 - RNA, 23 nt, synthetic construct
  source 1..23: mol_type = other RNA
aggtggagcaaactaggcactga

SEQ ID NO: 3141 - RNA, 23 nt, synthetic construct
  source 1..23: mol_type = other RNA
ggtggagcaaactaggcactgag

SEQ ID NO: 3142 - RNA, 23 nt, synthetic construct
  source 1..23: mol_type = other RNA
gtggagcaaactaggcactgagc

SEQ ID NO: 3143 - RNA, 23 nt, synthetic construct
  source 1..23: mol_type = other RNA
tggagcaaactaggcactgagcc

SEQ ID NO: 3144 - RNA, 23 nt, synthetic construct
  source 1..23: mol_type = other RNA
ggagcaaactaggcactgagcca

SEQ ID NO: 3145 - RNA, 23 nt, synthetic construct
  source 1..23: mol_type = other RNA
gagcaaactaggcactgagccaa

SEQ ID NO: 3146 - RNA, 23 nt, synthetic construct
  source 1..23: mol_type = other RNA
agcaaactaggcactgagccaaa

SEQ ID NO: 3147 - RNA, 23 nt, synthetic construct
  source 1..23: mol_type = other RNA
gcaaactaggcactgagccaaag

SEQ ID NO: 3148 - RNA, 23 nt, synthetic construct
  source 1..23: mol_type = other RNA
caaactaggcactgagccaaagg

SEQ ID NO: 3149 - RNA, 23 nt, synthetic construct
  source 1..23: mol_type = other RNA
aaactaggcactgagccaaaggg

SEQ ID NO: 3150 - RNA, 23 nt, synthetic construct
  source 1..23: mol_type = other RNA
aactaggcactgagccaaagggg

SEQ ID NO: 3151 - RNA, 23 nt, synthetic construct
  source 1..23: mol_type = other RNA
actaggcactgagccaaagggga

SEQ ID NO: 3152 - RNA, 23 nt, synthetic construct
  source 1..23: mol_type = other RNA
ctaggcactgagccaaaggggat

SEQ ID NO: 3153 - RNA, 23 nt, synthetic construct
  source 1..23: mol_type = other RNA
taggcactgagccaaaggggatc

SEQ ID NO: 3154 - RNA, 23 nt, synthetic construct
  source 1..23: mol_type = other RNA
aggcactgagccaaaggggatca

SEQ ID NO: 3155 - RNA, 23 nt, synthetic construct
  source 1..23: mol_type = other RNA
ggcactgagccaaaggggatcag

SEQ ID NO: 3156 - RNA, 23 nt, synthetic construct
  source 1..23: mol_type = other RNA
gcactgagccaaaggggatcagt

SEQ ID NO: 3157 - RNA, 23 nt, synthetic construct
  source 1..23: mol_type = other RNA
cactgagccaaaggggatcagtg

SEQ ID NO: 3158 - RNA, 23 nt, synthetic construct
  source 1..23: mol_type = other RNA
actgagccaaaggggatcagtga

SEQ ID NO: 3159 - RNA, 23 nt, synthetic construct
  source 1..23: mol_type = other RNA
ctgagccaaaggggatcagtgat

SEQ ID NO: 3160 - RNA, 23 nt, synthetic construct
  source 1..23: mol_type = other RNA
tgagccaaaggggatcagtgata

SEQ ID NO: 3161 - RNA, 23 nt, synthetic construct
  source 1..23: mol_type = other RNA
gagccaaaggggatcagtgatag

SEQ ID NO: 3162 - RNA, 23 nt, synthetic construct
  source 1..23: mol_type = other RNA
agccaaaggggatcagtgatagc

SEQ ID NO: 3163 - RNA, 23 nt, synthetic construct
  source 1..23: mol_type = other RNA
gccaaaggggatcagtgatagcc

SEQ ID NO: 3164 - RNA, 23 nt, synthetic construct
  source 1..23: mol_type = other RNA
ccaaaggggatcagtgatagcca

SEQ ID NO: 3165 - RNA, 24 nt, synthetic construct
  source 1..24: mol_type = other RNA
agccctacccagacatgatgtgga

SEQ ID NO: 3166 - RNA, 24 nt, synthetic construct
  source 1..24: mol_type = other RNA
gccctacccagacatgatgtggag

SEQ ID NO: 3167 - RNA, 24 nt, synthetic construct
  source 1..24: mol_type = other RNA
ccctacccagacatgatgtggagg

SEQ ID NO: 3168 - RNA, 24 nt, synthetic construct
  source 1..24: mol_type = other RNA
cctacccagacatgatgtggaggt

SEQ ID NO: 3169 - RNA, 24 nt, synthetic construct
  source 1..24: mol_type = other RNA
ctacccagacatgatgtggaggtg

SEQ ID NO: 3170 - RNA, 24 nt, synthetic construct
  source 1..24: mol_type = other RNA
tacccagacatgatgtggaggtgg

SEQ ID NO: 3171 - RNA, 24 nt, synthetic construct
  source 1..24: mol_type = other RNA
acccagacatgatgtggaggtgga

SEQ ID NO: 3172 - RNA, 24 nt, synthetic construct
  source 1..24: mol_type = other RNA
cccagacatgatgtggaggtggag

SEQ ID NO: 3173 - RNA, 24 nt, synthetic construct
  source 1..24: mol_type = other RNA
ccagacatgatgtggaggtggagc

SEQ ID NO: 3174 - RNA, 24 nt, synthetic construct
  source 1..24: mol_type = other RNA
cagacatgatgtggaggtggagca

SEQ ID NO: 3175 - RNA, 24 nt, synthetic construct
  source 1..24: mol_type = other RNA
agacatgatgtggaggtggagcaa

SEQ ID NO: 3176 - RNA, 24 nt, synthetic construct
  source 1..24: mol_type = other RNA
gacatgatgtggaggtggagcaaa

SEQ ID NO: 3177 - RNA, 24 nt, synthetic construct
  source 1..24: mol_type = other RNA
acatgatgtggaggtggagcaaac

SEQ ID NO: 3178 - RNA, 24 nt, synthetic construct
  source 1..24: mol_type = other RNA
catgatgtggaggtggagcaaact

SEQ ID NO: 3179 - RNA, 24 nt, synthetic construct
  source 1..24: mol_type = other RNA
atgatgtggaggtggagcaaacta

SEQ ID NO: 3180 - RNA, 24 nt, synthetic construct
  source 1..24: mol_type = other RNA
tgatgtggaggtggagcaaactag

SEQ ID NO: 3181 - RNA, 24 nt, synthetic construct
  source 1..24: mol_type = other RNA
gatgtggaggtggagcaaactagg

SEQ ID NO: 3182 - RNA, 24 nt, synthetic construct
  source 1..24: mol_type = other RNA
atgtggaggtggagcaaactaggc

SEQ ID NO: 3183 - RNA, 24 nt, synthetic construct
  source 1..24: mol_type = other RNA
tgtggaggtggagcaaactaggca

SEQ ID NO: 3184 - RNA, 24 nt, synthetic construct
  source 1..24: mol_type = other RNA
gtggaggtggagcaaactaggcac

SEQ ID NO: 3185 - RNA, 24 nt, synthetic construct
  source 1..24: mol_type = other RNA
tggaggtggagcaaactaggcact

SEQ ID NO: 3186 - RNA, 24 nt, synthetic construct
  source 1..24: mol_type = other RNA
ggaggtggagcaaactaggcactg

SEQ ID NO: 3187 - RNA, 24 nt, synthetic construct
  source 1..24: mol_type = other RNA
gaggtggagcaaactaggcactga

SEQ ID NO: 3188 - RNA, 24 nt, synthetic construct
  source 1..24: mol_type = other RNA
aggtggagcaaactaggcactgag

SEQ ID NO: 3189 - RNA, 24 nt, synthetic construct
  source 1..24: mol_type = other RNA
ggtggagcaaactaggcactgagc

SEQ ID NO: 3190 - RNA, 24 nt, synthetic construct
  source 1..24: mol_type = other RNA
gtggagcaaactaggcactgagcc

SEQ ID NO: 3191 - RNA, 24 nt, synthetic construct
  source 1..24: mol_type = other RNA
tggagcaaactaggcactgagcca

SEQ ID NO: 3192 - RNA, 24 nt, synthetic construct
  source 1..24: mol_type = other RNA
ggagcaaactaggcactgagccaa

SEQ ID NO: 3193 - RNA, 24 nt, synthetic construct
  source 1..24: mol_type = other RNA
gagcaaactaggcactgagccaaa

SEQ ID NO: 3194 - RNA, 24 nt, synthetic construct
  source 1..24: mol_type = other RNA
agcaaactaggcactgagccaaag

SEQ ID NO: 3195 - RNA, 24 nt, synthetic construct
  source 1..24: mol_type = other RNA
gcaaactaggcactgagccaaagg

SEQ ID NO: 3196 - RNA, 24 nt, synthetic construct
  source 1..24: mol_type = other RNA
caaactaggcactgagccaaaggg

SEQ ID NO: 3197 - RNA, 24 nt, synthetic construct
  source 1..24: mol_type = other RNA
aaactaggcactgagccaaagggg

SEQ ID NO: 3198 - RNA, 24 nt, synthetic construct
  source 1..24: mol_type = other RNA
aactaggcactgagccaaagggga

SEQ ID NO: 3199 - RNA, 24 nt, synthetic construct
  source 1..24: mol_type = other RNA
actaggcactgagccaaaggggat

SEQ ID NO: 3200 - RNA, 24 nt, synthetic construct
  source 1..24: mol_type = other RNA
ctaggcactgagccaaaggggatc

SEQ ID NO: 3201 - RNA, 24 nt, synthetic construct
  source 1..24: mol_type = other RNA
taggcactgagccaaaggggatca

SEQ ID NO: 3202 - RNA, 24 nt, synthetic construct
  source 1..24: mol_type = other RNA
aggcactgagccaaaggggatcag

SEQ ID NO: 3203 - RNA, 24 nt, synthetic construct
  source 1..24: mol_type = other RNA
ggcactgagccaaaggggatcagt

SEQ ID NO: 3204 - RNA, 24 nt, synthetic construct
  source 1..24: mol_type = other RNA
gcactgagccaaaggggatcagtg

SEQ ID NO: 3205 - RNA, 24 nt, synthetic construct
  source 1..24: mol_type = other RNA
cactgagccaaaggggatcagtga

SEQ ID NO: 3206 - RNA, 24 nt, synthetic construct
  source 1..24: mol_type = other RNA
actgagccaaaggggatcagtgat

SEQ ID NO: 3207 - RNA, 24 nt, synthetic construct
  source 1..24: mol_type = other RNA
ctgagccaaaggggatcagtgata

SEQ ID NO: 3208 - RNA, 24 nt, synthetic construct
  source 1..24: mol_type = other RNA
tgagccaaaggggatcagtgatag

SEQ ID NO: 3209 - RNA, 24 nt, synthetic construct
  source 1..24: mol_type = other RNA
gagccaaaggggatcagtgatagc

SEQ ID NO: 3210 - RNA, 24 nt, synthetic construct
  source 1..24: mol_type = other RNA
agccaaaggggatcagtgatagcc

SEQ ID NO: 3211 - RNA, 24 nt, synthetic construct
  source 1..24: mol_type = other RNA
gccaaaggggatcagtgatagcca

SEQ ID NO: 3212 - RNA, 25 nt, synthetic construct
  source 1..25: mol_type = other RNA
agccctacccagacatgatgtggag

SEQ ID NO: 3213 - RNA, 25 nt, synthetic construct
  source 1..25: mol_type = other RNA
gccctacccagacatgatgtggagg

SEQ ID NO: 3214 - RNA, 25 nt, synthetic construct
  source 1..25: mol_type = other RNA
ccctacccagacatgatgtggaggt

SEQ ID NO: 3215 - RNA, 25 nt, synthetic construct
  source 1..25: mol_type = other RNA
cctacccagacatgatgtggaggtg

SEQ ID NO: 3216 - RNA, 25 nt, synthetic construct
  source 1..25: mol_type = other RNA
ctacccagacatgatgtggaggtgg

SEQ ID NO: 3217 - RNA, 25 nt, synthetic construct
  source 1..25: mol_type = other RNA
tacccagacatgatgtggaggtgga

SEQ ID NO: 3218 - RNA, 25 nt, synthetic construct
  source 1..25: mol_type = other RNA
acccagacatgatgtggaggtggag

SEQ ID NO: 3219 - RNA, 25 nt, synthetic construct
  source 1..25: mol_type = other RNA
cccagacatgatgtggaggtggagc

SEQ ID NO: 3220 - RNA, 25 nt, synthetic construct
  source 1..25: mol_type = other RNA
ccagacatgatgtggaggtggagca

SEQ ID NO: 3221 - RNA, 25 nt, synthetic construct
  source 1..25: mol_type = other RNA
cagacatgatgtggaggtggagcaa

SEQ ID NO: 3222 - RNA, 25 nt, synthetic construct
  source 1..25: mol_type = other RNA
agacatgatgtggaggtggagcaaa

SEQ ID NO: 3223 - RNA, 25 nt, synthetic construct
  source 1..25: mol_type = other RNA
gacatgatgtggaggtggagcaaac

SEQ ID NO: 3224 - RNA, 25 nt, synthetic construct
  source 1..25: mol_type = other RNA
acatgatgtggaggtggagcaaact

SEQ ID NO: 3225 - RNA, 25 nt, synthetic construct
  source 1..25: mol_type = other RNA
catgatgtggaggtggagcaaacta

SEQ ID NO: 3226 - RNA, 25 nt, synthetic construct
  source 1..25: mol_type = other RNA
atgatgtggaggtggagcaaactag

SEQ ID NO: 3227 - RNA, 25 nt, synthetic construct
  source 1..25: mol_type = other RNA
tgatgtggaggtggagcaaactagg

SEQ ID NO: 3228 - RNA, 25 nt, synthetic construct
  source 1..25: mol_type = other RNA
gatgtggaggtggagcaaactaggc

SEQ ID NO: 3229 - RNA, 25 nt, synthetic construct
  source 1..25: mol_type = other RNA
atgtggaggtggagcaaactaggca

SEQ ID NO: 3230 - RNA, 25 nt, synthetic construct
  source 1..25: mol_type = other RNA
tgtggaggtggagcaaactaggcac

SEQ ID NO: 3231 - RNA, 25 nt, synthetic construct
  source 1..25: mol_type = other RNA
gtggaggtggagcaaactaggcact

SEQ ID NO: 3232 - RNA, 25 nt, synthetic construct
  source 1..25: mol_type = other RNA
tggaggtggagcaaactaggcactg

SEQ ID NO: 3233 - RNA, 25 nt, synthetic construct
  source 1..25: mol_type = other RNA
ggaggtggagcaaactaggcactga

SEQ ID NO: 3234 - RNA, 25 nt, synthetic construct
  source 1..25: mol_type = other RNA
gaggtggagcaaactaggcactgag

SEQ ID NO: 3235 - RNA, 25 nt, synthetic construct
  source 1..25: mol_type = other RNA
aggtggagcaaactaggcactgagc

SEQ ID NO: 3236 - RNA, 25 nt, synthetic construct
  source 1..25: mol_type = other RNA
ggtggagcaaactaggcactgagcc

SEQ ID NO: 3237 - RNA, 25 nt, synthetic construct
  source 1..25: mol_type = other RNA
gtggagcaaactaggcactgagcca

SEQ ID NO: 3238 - RNA, 25 nt, synthetic construct
  source 1..25: mol_type = other RNA
tggagcaaactaggcactgagccaa

SEQ ID NO: 3239 - RNA, 25 nt, synthetic construct
  source 1..25: mol_type = other RNA
ggagcaaactaggcactgagccaaa

SEQ ID NO: 3240 - RNA, 25 nt, synthetic construct
  source 1..25: mol_type = other RNA
gagcaaactaggcactgagccaaag

SEQ ID NO: 3241 - RNA, 25 nt, synthetic construct
  source 1..25: mol_type = other RNA
agcaaactaggcactgagccaaagg

SEQ ID NO: 3242 - RNA, 25 nt, synthetic construct
  source 1..25: mol_type = other RNA
gcaaactaggcactgagccaaaggg

SEQ ID NO: 3243 - RNA, 25 nt, synthetic construct
  source 1..25: mol_type = other RNA
caaactaggcactgagccaaagggg

SEQ ID NO: 3244 - RNA, 25 nt, synthetic construct
  source 1..25: mol_type = other RNA
aaactaggcactgagccaaagggga

SEQ ID NO: 3245 - RNA, 25 nt, synthetic construct
  source 1..25: mol_type = other RNA
aactaggcactgagccaaaggggat

SEQ ID NO: 3246 - RNA, 25 nt, synthetic construct
  source 1..25: mol_type = other RNA
actaggcactgagccaaaggggatc

SEQ ID NO: 3247 - RNA, 25 nt, synthetic construct
  source 1..25: mol_type = other RNA
ctaggcactgagccaaaggggatca

SEQ ID NO: 3248 - RNA, 25 nt, synthetic construct
  source 1..25: mol_type = other RNA
taggcactgagccaaaggggatcag

SEQ ID NO: 3249 - RNA, 25 nt, synthetic construct
  source 1..25: mol_type = other RNA
aggcactgagccaaaggggatcagt

SEQ ID NO: 3250 - RNA, 25 nt, synthetic construct
  source 1..25: mol_type = other RNA
ggcactgagccaaaggggatcagtg

SEQ ID NO: 3251 - RNA, 25 nt, synthetic construct
  source 1..25: mol_type = other RNA
gcactgagccaaaggggatcagtga

SEQ ID NO: 3252 - RNA, 25 nt, synthetic construct
  source 1..25: mol_type = other RNA
cactgagccaaaggggatcagtgat

SEQ ID NO: 3253 - RNA, 25 nt, synthetic construct
  source 1..25: mol_type = other RNA
actgagccaaaggggatcagtgata

SEQ ID NO: 3254 - RNA, 25 nt, synthetic construct
  source 1..25: mol_type = other RNA
ctgagccaaaggggatcagtgatag

SEQ ID NO: 3255 - RNA, 25 nt, synthetic construct
  source 1..25: mol_type = other RNA
tgagccaaaggggatcagtgatagc

SEQ ID NO: 3256 - RNA, 25 nt, synthetic construct
  source 1..25: mol_type = other RNA
gagccaaaggggatcagtgatagcc

SEQ ID NO: 3257 - RNA, 25 nt, synthetic construct
  source 1..25: mol_type = other RNA
agccaaaggggatcagtgatagcca

SEQ ID NO: 3258 - RNA, 26 nt, synthetic construct
  source 1..26: mol_type = other RNA
agccctacccagacatgatgtggagg

SEQ ID NO: 3259 - RNA, 26 nt, synthetic construct
  source 1..26: mol_type = other RNA
gccctacccagacatgatgtggaggt

SEQ ID NO: 3260 - RNA, 26 nt, synthetic construct
  source 1..26: mol_type = other RNA
ccctacccagacatgatgtggaggtg

SEQ ID NO: 3261 - RNA, 26 nt, synthetic construct
  source 1..26: mol_type = other RNA
cctacccagacatgatgtggaggtgg

SEQ ID NO: 3262 - RNA, 26 nt, synthetic construct
  source 1..26: mol_type = other RNA
ctacccagacatgatgtggaggtgga

SEQ ID NO: 3263 - RNA, 26 nt, synthetic construct
  source 1..26: mol_type = other RNA
tacccagacatgatgtggaggtggag

SEQ ID NO: 3264 - RNA, 26 nt, synthetic construct
  source 1..26: mol_type = other RNA
acccagacatgatgtggaggtggagc

SEQ ID NO: 3265 - RNA, 26 nt, synthetic construct
  source 1..26: mol_type = other RNA
cccagacatgatgtggaggtggagca

SEQ ID NO: 3266 - RNA, 26 nt, synthetic construct
  source 1..26: mol_type = other RNA
ccagacatgatgtggaggtggagcaa

SEQ ID NO: 3267 - RNA, 26 nt, synthetic construct
  source 1..26: mol_type = other RNA
cagacatgatgtggaggtggagcaaa

SEQ ID NO: 3268 - RNA, 26 nt, synthetic construct
  source 1..26: mol_type = other RNA
agacatgatgtggaggtggagcaaac

SEQ ID NO: 3269 - RNA, 26 nt, synthetic construct
  source 1..26: mol_type = other RNA
gacatgatgtggaggtggagcaaact

SEQ ID NO: 3270 - RNA, 26 nt, synthetic construct
  source 1..26: mol_type = other RNA
acatgatgtggaggtggagcaaacta

SEQ ID NO: 3271 - RNA, 26 nt, synthetic construct
  source 1..26: mol_type = other RNA
catgatgtggaggtggagcaaactag

SEQ ID NO: 3272 - RNA, 26 nt, synthetic construct
  source 1..26: mol_type = other RNA
atgatgtggaggtggagcaaactagg

SEQ ID NO: 3273 - RNA, 26 nt, synthetic construct
  source 1..26: mol_type = other RNA
tgatgtggaggtggagcaaactaggc

SEQ ID NO: 3274 - RNA, 26 nt, synthetic construct
  source 1..26: mol_type = other RNA
gatgtggaggtggagcaaactaggca

SEQ ID NO: 3275 - RNA, 26 nt, synthetic construct
  source 1..26: mol_type = other RNA
atgtggaggtggagcaaactaggcac

SEQ ID NO: 3276 - RNA, 26 nt, synthetic construct
  source 1..26: mol_type = other RNA
tgtggaggtggagcaaactaggcact

SEQ ID NO: 3277 - RNA, 26 nt, synthetic construct
  source 1..26: mol_type = other RNA
gtggaggtggagcaaactaggcactg

SEQ ID NO: 3278 - RNA, 26 nt, synthetic construct
  source 1..26: mol_type = other RNA
tggaggtggagcaaactaggcactga

SEQ ID NO: 3279 - RNA, 26 nt, synthetic construct
  source 1..26: mol_type = other RNA
ggaggtggagcaaactaggcactgag

SEQ ID NO: 3280 - RNA, 26 nt, synthetic construct
  source 1..26: mol_type = other RNA
gaggtggagcaaactaggcactgagc

SEQ ID NO: 3281 - RNA, 26 nt, synthetic construct
  source 1..26: mol_type = other RNA
aggtggagcaaactaggcactgagcc

SEQ ID NO: 3282 - RNA, 26 nt, synthetic construct
  source 1..26: mol_type = other RNA
ggtggagcaaactaggcactgagcca

SEQ ID NO: 3283 - RNA, 26 nt, synthetic construct
  source 1..26: mol_type = other RNA
gtggagcaaactaggcactgagccaa

SEQ ID NO: 3284 - RNA, 26 nt, synthetic construct
  source 1..26: mol_type = other RNA
tggagcaaactaggcactgagccaaa

SEQ ID NO: 3285 - RNA, 26 nt, synthetic construct
  source 1..26: mol_type = other RNA
ggagcaaactaggcactgagccaaag

SEQ ID NO: 3286 - RNA, 26 nt, synthetic construct
  source 1..26: mol_type = other RNA
gagcaaactaggcactgagccaaagg

SEQ ID NO: 3287 - RNA, 26 nt, synthetic construct
  source 1..26: mol_type = other RNA
agcaaactaggcactgagccaaaggg

SEQ ID NO: 3288 - RNA, 26 nt, synthetic construct
  source 1..26: mol_type = other RNA
gcaaactaggcactgagccaaagggg

SEQ ID NO: 3289 - RNA, 26 nt, synthetic construct
  source 1..26: mol_type = other RNA
caaactaggcactgagccaaagggga

SEQ ID NO: 3290 - RNA, 26 nt, synthetic construct
  source 1..26: mol_type = other RNA
aaactaggcactgagccaaaggggat

SEQ ID NO: 3291 - RNA, 26 nt, synthetic construct
  source 1..26: mol_type = other RNA
aactaggcactgagccaaaggggatc

SEQ ID NO: 3292 - RNA, 26 nt, synthetic construct
  source 1..26: mol_type = other RNA
actaggcactgagccaaaggggatca

SEQ ID NO: 3293 - RNA, 26 nt, synthetic construct
  source 1..26: mol_type = other RNA
ctaggcactgagccaaaggggatcag

SEQ ID NO: 3294 - RNA, 26 nt, synthetic construct
  source 1..26: mol_type = other RNA
taggcactgagccaaaggggatcagt

SEQ ID NO: 3295 - RNA, 26 nt, synthetic construct
  source 1..26: mol_type = other RNA
aggcactgagccaaaggggatcagtg

SEQ ID NO: 3296 - RNA, 26 nt, synthetic construct
  source 1..26: mol_type = other RNA
ggcactgagccaaaggggatcagtga

SEQ ID NO: 3297 - RNA, 26 nt, synthetic construct
  source 1..26: mol_type = other RNA
gcactgagccaaaggggatcagtgat

SEQ ID NO: 3298 - RNA, 26 nt, synthetic construct
  source 1..26: mol_type = other RNA
cactgagccaaaggggatcagtgata

SEQ ID NO: 3299 - RNA, 26 nt, synthetic construct
  source 1..26: mol_type = other RNA
actgagccaaaggggatcagtgatag

SEQ ID NO: 3300 - RNA, 26 nt, synthetic construct
  source 1..26: mol_type = other RNA
ctgagccaaaggggatcagtgatagc

SEQ ID NO: 3301 - RNA, 26 nt, synthetic construct
  source 1..26: mol_type = other RNA
tgagccaaaggggatcagtgatagcc

SEQ ID NO: 3302 - RNA, 26 nt, synthetic construct
  source 1..26: mol_type = other RNA
gagccaaaggggatcagtgatagcca

SEQ ID NO: 3303 - RNA, 18 nt, synthetic construct
  source 1..18: mol_type = other RNA
attagtcttatttggcgt

SEQ ID NO: 3304 - RNA, 18 nt, synthetic construct
  source 1..18: mol_type = other RNA
ttagtcttatttggcgtt

SEQ ID NO: 3305 - RNA, 18 nt, synthetic construct
  source 1..18: mol_type = other RNA
tagtcttatttggcgtta

SEQ ID NO: 3306 - RNA, 18 nt, synthetic construct
  source 1..18: mol_type = other RNA
agtcttatttggcgttat

SEQ ID NO: 3307 - RNA, 18 nt, synthetic construct
  source 1..18: mol_type = other RNA
gtcttatttggcgttatt

SEQ ID NO: 3308 - RNA, 18 nt, synthetic construct
  source 1..18: mol_type = other RNA
tcttatttggcgttatta

SEQ ID NO: 3309 - RNA, 18 nt, synthetic construct
  source 1..18: mol_type = other RNA
cttatttggcgttattaa

SEQ ID NO: 3310 - RNA, 18 nt, synthetic construct
  source 1..18: mol_type = other RNA
gcgttattaattctacag

SEQ ID NO: 3311 - RNA, 18 nt, synthetic construct
  source 1..18: mol_type = other RNA
cgttattaattctacaga

SEQ ID NO: 3312 - RNA, 18 nt, synthetic construct
  source 1..18: mol_type = other RNA
taattctacagagggagc

SEQ ID NO: 3313 - RNA, 18 nt, synthetic construct
  source 1..18: mol_type = other RNA
ttctacagagggagcata

SEQ ID NO: 3314 - RNA, 18 nt, synthetic construct
  source 1..18: mol_type = other RNA
ctacagagggagcataaa

SEQ ID NO: 3315 - RNA, 19 nt, synthetic construct
  source 1..19: mol_type = other RNA
tgctaggattgtaattagt

SEQ ID NO: 3316 - RNA, 19 nt, synthetic construct
  source 1..19: mol_type = other RNA
ctaggattgtaattagtct

SEQ ID NO: 3317 - RNA, 19 nt, synthetic construct
  source 1..19: mol_type = other RNA
gtaattagtcttatttggc

SEQ ID NO: 3318 - RNA, 19 nt, synthetic construct
  source 1..19: mol_type = other RNA
taattagtcttatttggcg

SEQ ID NO: 3319 - RNA, 19 nt, synthetic construct
  source 1..19: mol_type = other RNA
aattagtcttatttggcgt

SEQ ID NO: 3320 - RNA, 19 nt, synthetic construct
  source 1..19: mol_type = other RNA
attagtcttatttggcgtt

SEQ ID NO: 3321 - RNA, 19 nt, synthetic construct
  source 1..19: mol_type = other RNA
ttagtcttatttggcgtta

SEQ ID NO: 3322 - RNA, 19 nt, synthetic construct
  source 1..19: mol_type = other RNA
tagtcttatttggcgttat

SEQ ID NO: 3323 - RNA, 19 nt, synthetic construct
  source 1..19: mol_type = other RNA
agtcttatttggcgttatt

SEQ ID NO: 3324 - RNA, 19 nt, synthetic construct
  source 1..19: mol_type = other RNA
gtcttatttggcgttatta

SEQ ID NO: 3325 - RNA, 19 nt, synthetic construct
  source 1..19: mol_type = other RNA
tcttatttggcgttattaa

SEQ ID NO: 3326 - RNA, 19 nt, synthetic construct
  source 1..19: mol_type = other RNA
cttatttggcgttattaat

SEQ ID NO: 3327 - RNA, 19 nt, synthetic construct
  source 1..19: mol_type = other RNA
ttatttggcgttattaatt

SEQ ID NO: 3328 - RNA, 19 nt, synthetic construct
  source 1..19: mol_type = other RNA
ggcgttattaattctacag

SEQ ID NO: 3329 - RNA, 19 nt, synthetic construct
  source 1..19: mol_type = other RNA
gcgttattaattctacaga

SEQ ID NO: 3330 - RNA, 19 nt, synthetic construct
  source 1..19: mol_type = other RNA
cgttattaattctacagag

SEQ ID NO: 3331 - RNA, 19 nt, synthetic construct
  source 1..19: mol_type = other RNA
attaattctacagagggag

SEQ ID NO: 3332 - RNA, 19 nt, synthetic construct
  source 1..19: mol_type = other RNA
ttaattctacagagggagc

SEQ ID NO: 3333 - RNA, 19 nt, synthetic construct
  source 1..19: mol_type = other RNA
taattctacagagggagca

SEQ ID NO: 3334 - RNA, 19 nt, synthetic construct
  source 1..19: mol_type = other RNA
attctacagagggagcata

SEQ ID NO: 3335 - RNA, 19 nt, synthetic construct
  source 1..19: mol_type = other RNA
ttctacagagggagcataa

SEQ ID NO: 3336 - RNA, 19 nt, synthetic construct
  source 1..19: mol_type = other RNA
tctacagagggagcataaa

SEQ ID NO: 3337 - RNA, 19 nt, synthetic construct
  source 1..19: mol_type = other RNA
ctacagagggagcataaaa

SEQ ID NO: 3338 - RNA, 19 nt, synthetic construct
  source 1..19: mol_type = other RNA
tacagagggagcataaaac

SEQ ID NO: 3339 - RNA, 20 nt, synthetic construct
  source 1..20: mol_type = other RNA
tgctaggattgtaattagtc

SEQ ID NO: 3340 - RNA, 20 nt, synthetic construct
  source 1..20: mol_type = other RNA
gctaggattgtaattagtct

SEQ ID NO: 3341 - RNA, 20 nt, synthetic construct
  source 1..20: mol_type = other RNA
ctaggattgtaattagtctt

SEQ ID NO: 3342 - RNA, 20 nt, synthetic construct
  source 1..20: mol_type = other RNA
taggattgtaattagtctta

SEQ ID NO: 3343 - RNA, 20 nt, synthetic construct
  source 1..20: mol_type = other RNA
tgtaattagtcttatttggc

SEQ ID NO: 3344 - RNA, 20 nt, synthetic construct
  source 1..20: mol_type = other RNA
gtaattagtcttatttggcg

SEQ ID NO: 3345 - RNA, 20 nt, synthetic construct
  source 1..20: mol_type = other RNA
taattagtcttatttggcgt

SEQ ID NO: 3346 - RNA, 20 nt, synthetic construct
  source 1..20: mol_type = other RNA
aattagtcttatttggcgtt

SEQ ID NO: 3347 - RNA, 20 nt, synthetic construct
  source 1..20: mol_type = other RNA
attagtcttatttggcgtta

SEQ ID NO: 3348 - RNA, 20 nt, synthetic construct
  source 1..20: mol_type = other RNA
ttagtcttatttggcgttat

SEQ ID NO: 3349 - RNA, 20 nt, synthetic construct
  source 1..20: mol_type = other RNA
tagtcttatttggcgttatt

SEQ ID NO: 3350 - RNA, 20 nt, synthetic construct
  source 1..20: mol_type = other RNA
agtcttatttggcgttatta

SEQ ID NO: 3351 - RNA, 20 nt, synthetic construct
  source 1..20: mol_type = other RNA
gtcttatttggcgttattaa

SEQ ID NO: 3352 - RNA, 20 nt, synthetic construct
  source 1..20: mol_type = other RNA
tcttatttggcgttattaat

SEQ ID NO: 3353 - RNA, 20 nt, synthetic construct
  source 1..20: mol_type = other RNA
cttatttggcgttattaatt

SEQ ID NO: 3354 - RNA, 20 nt, synthetic construct
  source 1..20: mol_type = other RNA
ttatttggcgttattaattc

SEQ ID NO: 3355 - RNA, 20 nt, synthetic construct
  source 1..20: mol_type = other RNA
tttggcgttattaattctac

SEQ ID NO: 3356 - RNA, 20 nt, synthetic construct
  source 1..20: mol_type = other RNA
tggcgttattaattctacag

SEQ ID NO: 3357 - RNA, 20 nt, synthetic construct
  source 1..20: mol_type = other RNA
ggcgttattaattctacaga

SEQ ID NO: 3358 - RNA, 20 nt, synthetic construct
  source 1..20: mol_type = other RNA
gcgttattaattctacagag

SEQ ID NO: 3359 - RNA, 20 nt, synthetic construct
  source 1..20: mol_type = other RNA
cgttattaattctacagagg

SEQ ID NO: 3360 - RNA, 20 nt, synthetic construct
  source 1..20: mol_type = other RNA
gttattaattctacagaggg

SEQ ID NO: 3361 - RNA, 20 nt, synthetic construct
  source 1..20: mol_type = other RNA
tattaattctacagagggag

SEQ ID NO: 3362 - RNA, 20 nt, synthetic construct
  source 1..20: mol_type = other RNA
attaattctacagagggagc

SEQ ID NO: 3363 - RNA, 20 nt, synthetic construct
  source 1..20: mol_type = other RNA
ttaattctacagagggagca

SEQ ID NO: 3364 - RNA, 20 nt, synthetic construct
  source 1..20: mol_type = other RNA
taattctacagagggagcat

SEQ ID NO: 3365 - RNA, 20 nt, synthetic construct
  source 1..20: mol_type = other RNA
aattctacagagggagcata

SEQ ID NO: 3366 - RNA, 20 nt, synthetic construct
  source 1..20: mol_type = other RNA
attctacagagggagcataa

SEQ ID NO: 3367 - RNA, 20 nt, synthetic construct
  source 1..20: mol_type = other RNA
ttctacagagggagcataaa

SEQ ID NO: 3368 - RNA, 20 nt, synthetic construct
  source 1..20: mol_type = other RNA
tctacagagggagcataaaa

SEQ ID NO: 3369 - RNA, 20 nt, synthetic construct
  source 1..20: mol_type = other RNA
ctacagagggagcataaaac

SEQ ID NO: 3370 - RNA, 20 nt, synthetic construct
  source 1..20: mol_type = other RNA
tacagagggagcataaaaca

SEQ ID NO: 3371 - RNA, 20 nt, synthetic construct
  source 1..20: mol_type = other RNA
agagggagcataaaacattt

SEQ ID NO: 3372 - RNA, 20 nt, synthetic construct
  source 1..20: mol_type = other RNA
gggagcataaaacatttaat

SEQ ID NO: 3373 - RNA, 21 nt, synthetic construct
  source 1..21: mol_type = other RNA
tgctaggattgtaattagtct

SEQ ID NO: 3374 - RNA, 21 nt, synthetic construct
  source 1..21: mol_type = other RNA
gctaggattgtaattagtctt

SEQ ID NO: 3375 - RNA, 21 nt, synthetic construct
  source 1..21: mol_type = other RNA
ctaggattgtaattagtctta

SEQ ID NO: 3376 - RNA, 21 nt, synthetic construct
  source 1..21: mol_type = other RNA
taggattgtaattagtcttat

SEQ ID NO: 3377 - RNA, 21 nt, synthetic construct
  source 1..21: mol_type = other RNA
attgtaattagtcttatttgg

SEQ ID NO: 3378 - RNA, 21 nt, synthetic construct
  source 1..21: mol_type = other RNA
ttgtaattagtcttatttggc

SEQ ID NO: 3379 - RNA, 21 nt, synthetic construct
  source 1..21: mol_type = other RNA
tgtaattagtcttatttggcg

SEQ ID NO: 3380 - RNA, 21 nt, synthetic construct
  source 1..21: mol_type = other RNA
gtaattagtcttatttggcgt

SEQ ID NO: 3381 - RNA, 21 nt, synthetic construct
  source 1..21: mol_type = other RNA
taattagtcttatttggcgtt

SEQ ID NO: 3382 - RNA, 21 nt, synthetic construct
  source 1..21: mol_type = other RNA
aattagtcttatttggcgtta

SEQ ID NO: 3383 - RNA, 21 nt, synthetic construct
  source 1..21: mol_type = other RNA
attagtcttatttggcgttat

SEQ ID NO: 3384 - RNA, 21 nt, synthetic construct
  source 1..21: mol_type = other RNA
ttagtcttatttggcgttatt

SEQ ID NO: 3385 - RNA, 21 nt, synthetic construct
  source 1..21: mol_type = other RNA
tagtcttatttggcgttatta

SEQ ID NO: 3386 - RNA, 21 nt, synthetic construct
  source 1..21: mol_type = other RNA
agtcttatttggcgttattaa

SEQ ID NO: 3387 - RNA, 21 nt, synthetic construct
  source 1..21: mol_type = other RNA
gtcttatttggcgttattaat

SEQ ID NO: 3388 - RNA, 21 nt, synthetic construct
  source 1..21: mol_type = other RNA
tcttatttggcgttattaatt

SEQ ID NO: 3389 - RNA, 21 nt, synthetic construct
  source 1..21: mol_type = other RNA
cttatttggcgttattaattc

SEQ ID NO: 3390 - RNA, 21 nt, synthetic construct
  source 1..21: mol_type = other RNA
ttatttggcgttattaattct

SEQ ID NO: 3391 - RNA, 21 nt, synthetic construct
  source 1..21: mol_type = other RNA
atttggcgttattaattctac

SEQ ID NO: 3392 - RNA, 21 nt, synthetic construct
  source 1..21: mol_type = other RNA
tttggcgttattaattctaca

SEQ ID NO: 3393 - RNA, 21 nt, synthetic construct
  source 1..21: mol_type = other RNA
ttggcgttattaattctacag

SEQ ID NO: 3394 - RNA, 21 nt, synthetic construct
  source 1..21: mol_type = other RNA
tggcgttattaattctacaga

SEQ ID NO: 3395 - RNA, 21 nt, synthetic construct
  source 1..21: mol_type = other RNA
ggcgttattaattctacagag

SEQ ID NO: 3396 - RNA, 21 nt, synthetic construct
  source 1..21: mol_type = other RNA
gcgttattaattctacagagg

SEQ ID NO: 3397 - RNA, 21 nt, synthetic construct
  source 1..21: mol_type = other RNA
cgttattaattctacagaggg

SEQ ID NO: 3398 - RNA, 21 nt, synthetic construct
  source 1..21: mol_type = other RNA
gttattaattctacagaggga

SEQ ID NO: 3399 - RNA, 21 nt, synthetic construct
  source 1..21: mol_type = other RNA
ttattaattctacagagggag

SEQ ID NO: 3400 - RNA, 21 nt, synthetic construct
  source 1..21: mol_type = other RNA
tattaattctacagagggagc

SEQ ID NO: 3401 - RNA, 21 nt, synthetic construct
  source 1..21: mol_type = other RNA
attaattctacagagggagca

SEQ ID NO: 3402 - RNA, 21 nt, synthetic construct
  source 1..21: mol_type = other RNA
ttaattctacagagggagcat

SEQ ID NO: 3403 - RNA, 21 nt, synthetic construct
  source 1..21: mol_type = other RNA
taattctacagagggagcata

SEQ ID NO: 3404 - RNA, 21 nt, synthetic construct
  source 1..21: mol_type = other RNA
aattctacagagggagcataa

SEQ ID NO: 3405 - RNA, 21 nt, synthetic construct
  source 1..21: mol_type = other RNA
attctacagagggagcataaa

SEQ ID NO: 3406 - RNA, 21 nt, synthetic construct
  source 1..21: mol_type = other RNA
ttctacagagggagcataaaa

SEQ ID NO: 3407 - RNA, 21 nt, synthetic construct
  source 1..21: mol_type = other RNA
tctacagagggagcataaaac

SEQ ID NO: 3408 - RNA, 21 nt, synthetic construct
  source 1..21: mol_type = other RNA
ctacagagggagcataaaaca

SEQ ID NO: 3409 - RNA, 21 nt, synthetic construct
  source 1..21: mol_type = other RNA
tacagagggagcataaaacat

SEQ ID NO: 3410 - RNA, 21 nt, synthetic construct
  source 1..21: mol_type = other RNA
acagagggagcataaaacatt

SEQ ID NO: 3411 - RNA, 21 nt, synthetic construct
  source 1..21: mol_type = other RNA
cagagggagcataaaacattt

SEQ ID NO: 3412 - RNA, 21 nt, synthetic construct
  source 1..21: mol_type = other RNA
agagggagcataaaacattta

SEQ ID NO: 3413 - RNA, 21 nt, synthetic construct
  source 1..21: mol_type = other RNA
agggagcataaaacatttaat

SEQ ID NO: 3414 - RNA, 21 nt, synthetic construct
  source 1..21: mol_type = other RNA
gggagcataaaacatttaata

SEQ ID NO: 3415 - RNA, 21 nt, synthetic construct
  source 1..21: mol_type = other RNA
ggagcataaaacatttaataa

SEQ ID NO: 3416 - RNA, 21 nt, synthetic construct
  source 1..21: mol_type = other RNA
gagcataaaacatttaataat

SEQ ID NO: 3417 - RNA, 22 nt, synthetic construct
  source 1..22: mol_type = other RNA
tgctaggattgtaattagtctt

SEQ ID NO: 3418 - RNA, 22 nt, synthetic construct
  source 1..22: mol_type = other RNA
gctaggattgtaattagtctta

SEQ ID NO: 3419 - RNA, 22 nt, synthetic construct
  source 1..22: mol_type = other RNA
ctaggattgtaattagtcttat

SEQ ID NO: 3420 - RNA, 22 nt, synthetic construct
  source 1..22: mol_type = other RNA
taggattgtaattagtcttatt

SEQ ID NO: 3421 - RNA, 22 nt, synthetic construct
  source 1..22: mol_type = other RNA
gattgtaattagtcttatttgg

SEQ ID NO: 3422 - RNA, 22 nt, synthetic construct
  source 1..22: mol_type = other RNA
attgtaattagtcttatttggc

SEQ ID NO: 3423 - RNA, 22 nt, synthetic construct
  source 1..22: mol_type = other RNA
ttgtaattagtcttatttggcg

SEQ ID NO: 3424 - RNA, 22 nt, synthetic construct
  source 1..22: mol_type = other RNA
tgtaattagtcttatttggcgt

SEQ ID NO: 3425 - RNA, 22 nt, synthetic construct
  source 1..22: mol_type = other RNA
gtaattagtcttatttggcgtt

SEQ ID NO: 3426 - RNA, 22 nt, synthetic construct
  source 1..22: mol_type = other RNA
taattagtcttatttggcgtta

SEQ ID NO: 3427 - RNA, 22 nt, synthetic construct
  source 1..22: mol_type = other RNA
aattagtcttatttggcgttat

SEQ ID NO: 3428 - RNA, 22 nt, synthetic construct
  source 1..22: mol_type = other RNA
attagtcttatttggcgttatt

SEQ ID NO: 3429 - RNA, 22 nt, synthetic construct
  source 1..22: mol_type = other RNA
ttagtcttatttggcgttatta

SEQ ID NO: 3430 - RNA, 22 nt, synthetic construct
  source 1..22: mol_type = other RNA
tagtcttatttggcgttattaa

SEQ ID NO: 3431 - RNA, 22 nt, synthetic construct
  source 1..22: mol_type = other RNA
agtcttatttggcgttattaat

SEQ ID NO: 3432 - RNA, 22 nt, synthetic construct
  source 1..22: mol_type = other RNA
gtcttatttggcgttattaatt

SEQ ID NO: 3433 - RNA, 22 nt, synthetic construct
  source 1..22: mol_type = other RNA
tcttatttggcgttattaattc

SEQ ID NO: 3434 - RNA, 22 nt, synthetic construct
  source 1..22: mol_type = other RNA
cttatttggcgttattaattct

SEQ ID NO: 3435 - RNA, 22 nt, synthetic construct
  source 1..22: mol_type = other RNA
ttatttggcgttattaattcta

SEQ ID NO: 3436 - RNA, 22 nt, synthetic construct
  source 1..22: mol_type = other RNA
tatttggcgttattaattctac

SEQ ID NO: 3437 - RNA, 22 nt, synthetic construct
  source 1..22: mol_type = other RNA
atttggcgttattaattctaca

SEQ ID NO: 3438 - RNA, 22 nt, synthetic construct
  source 1..22: mol_type = other RNA
tttggcgttattaattctacag

SEQ ID NO: 3439 - RNA, 22 nt, synthetic construct
  source 1..22: mol_type = other RNA
ttggcgttattaattctacaga

SEQ ID NO: 3440 - RNA, 22 nt, synthetic construct
  source 1..22: mol_type = other RNA
tggcgttattaattctacagag

SEQ ID NO: 3441 - RNA, 22 nt, synthetic construct
  source 1..22: mol_type = other RNA
ggcgttattaattctacagagg

SEQ ID NO: 3442 - RNA, 22 nt, synthetic construct
  source 1..22: mol_type = other RNA
gcgttattaattctacagaggg

SEQ ID NO: 3443 - RNA, 22 nt, synthetic construct
  source 1..22: mol_type = other RNA
cgttattaattctacagaggga

SEQ ID NO: 3444 - RNA, 22 nt, synthetic construct
  source 1..22: mol_type = other RNA
gttattaattctacagagggag

SEQ ID NO: 3445 - RNA, 22 nt, synthetic construct
  source 1..22: mol_type = other RNA
ttattaattctacagagggagc

SEQ ID NO: 3446 - RNA, 22 nt, synthetic construct
  source 1..22: mol_type = other RNA
tattaattctacagagggagca

SEQ ID NO: 3447 - RNA, 22 nt, synthetic construct
  source 1..22: mol_type = other RNA
attaattctacagagggagcat

SEQ ID NO: 3448 - RNA, 22 nt, synthetic construct
  source 1..22: mol_type = other RNA
ttaattctacagagggagcata

SEQ ID NO: 3449 - RNA, 22 nt, synthetic construct
  source 1..22: mol_type = other RNA
taattctacagagggagcataa

SEQ ID NO: 3450 - RNA, 22 nt, synthetic construct
  source 1..22: mol_type = other RNA
aattctacagagggagcataaa

SEQ ID NO: 3451 - RNA, 22 nt, synthetic construct
  source 1..22: mol_type = other RNA
attctacagagggagcataaaa

SEQ ID NO: 3452 - RNA, 22 nt, synthetic construct
  source 1..22: mol_type = other RNA
ttctacagagggagcataaaac

SEQ ID NO: 3453 - RNA, 22 nt, synthetic construct
  source 1..22: mol_type = other RNA
tctacagagggagcataaaaca

SEQ ID NO: 3454 - RNA, 22 nt, synthetic construct
  source 1..22: mol_type = other RNA
ctacagagggagcataaaacat

SEQ ID NO: 3455 - RNA, 22 nt, synthetic construct
  source 1..22: mol_type = other RNA
tacagagggagcataaaacatt

SEQ ID NO: 3456 - RNA, 22 nt, synthetic construct
  source 1..22: mol_type = other RNA
acagagggagcataaaacattt

SEQ ID NO: 3457 - RNA, 22 nt, synthetic construct
  source 1..22: mol_type = other RNA
cagagggagcataaaacattta

SEQ ID NO: 3458 - RNA, 22 nt, synthetic construct
  source 1..22: mol_type = other RNA
agagggagcataaaacatttaa

SEQ ID NO: 3459 - RNA, 22 nt, synthetic construct
  source 1..22: mol_type = other RNA
gagggagcataaaacatttaat

SEQ ID NO: 3460 - RNA, 22 nt, synthetic construct
  source 1..22: mol_type = other RNA
agggagcataaaacatttaata

SEQ ID NO: 3461 - RNA, 22 nt, synthetic construct
  source 1..22: mol_type = other RNA
gggagcataaaacatttaataa

SEQ ID NO: 3462 - RNA, 22 nt, synthetic construct
  source 1..22: mol_type = other RNA
ggagcataaaacatttaataat

SEQ ID NO: 3463 - RNA, 22 nt, synthetic construct
  source 1..22: mol_type = other RNA
gagcataaaacatttaataata

SEQ ID NO: 3464 - RNA, 23 nt, synthetic construct
  source 1..23: mol_type = other RNA
tgctaggattgtaattagtctta

SEQ ID NO: 3465 - RNA, 23 nt, synthetic construct
  source 1..23: mol_type = other RNA
gctaggattgtaattagtcttat

SEQ ID NO: 3466 - RNA, 23 nt, synthetic construct
  source 1..23: mol_type = other RNA
ctaggattgtaattagtcttatt

SEQ ID NO: 3467 - RNA, 23 nt, synthetic construct
  source 1..23: mol_type = other RNA
taggattgtaattagtcttattt

SEQ ID NO: 3468 - RNA, 23 nt, synthetic construct
  source 1..23: mol_type = other RNA
aggattgtaattagtcttatttg

SEQ ID NO: 3469 - RNA, 23 nt, synthetic construct
  source 1..23: mol_type = other RNA
ggattgtaattagtcttatttgg

SEQ ID NO: 3470 - RNA, 23 nt, synthetic construct
  source 1..23: mol_type = other RNA
gattgtaattagtcttatttggc

SEQ ID NO: 3471 - RNA, 23 nt, synthetic construct
  source 1..23: mol_type = other RNA
attgtaattagtcttatttggcg

SEQ ID NO: 3472 - RNA, 23 nt, synthetic construct
  source 1..23: mol_type = other RNA
ttgtaattagtcttatttggcgt

SEQ ID NO: 3473 - RNA, 23 nt, synthetic construct
  source 1..23: mol_type = other RNA
tgtaattagtcttatttggcgtt

SEQ ID NO: 3474 - RNA, 23 nt, synthetic construct
  source 1..23: mol_type = other RNA
gtaattagtcttatttggcgtta

SEQ ID NO: 3475 - RNA, 23 nt, synthetic construct
  source 1..23: mol_type = other RNA
taattagtcttatttggcgttat

SEQ ID NO: 3476 - RNA, 23 nt, synthetic construct
  source 1..23: mol_type = other RNA
aattagtcttatttggcgttatt

SEQ ID NO: 3477 - RNA, 23 nt, synthetic construct
  source 1..23: mol_type = other RNA
attagtcttatttggcgttatta

SEQ ID NO: 3478 - RNA, 23 nt, synthetic construct
  source 1..23: mol_type = other RNA
ttagtcttatttggcgttattaa

SEQ ID NO: 3479 - RNA, 23 nt, synthetic construct
  source 1..23: mol_type = other RNA
tagtcttatttggcgttattaat

SEQ ID NO: 3480 - RNA, 23 nt, synthetic construct
  source 1..23: mol_type = other RNA
agtcttatttggcgttattaatt

SEQ ID NO: 3481 - RNA, 23 nt, synthetic construct
  source 1..23: mol_type = other RNA
gtcttatttggcgttattaattc

SEQ ID NO: 3482 - RNA, 23 nt, synthetic construct
  source 1..23: mol_type = other RNA
tcttatttggcgttattaattct

SEQ ID NO: 3483 - RNA, 23 nt, synthetic construct
  source 1..23: mol_type = other RNA
cttatttggcgttattaattcta

SEQ ID NO: 3484 - RNA, 23 nt, synthetic construct
  source 1..23: mol_type = other RNA
ttatttggcgttattaattctac

SEQ ID NO: 3485 - RNA, 23 nt, synthetic construct
  source 1..23: mol_type = other RNA
tatttggcgttattaattctaca

SEQ ID NO: 3486 - RNA, 23 nt, synthetic construct
  source 1..23: mol_type = other RNA
atttggcgttattaattctacag

SEQ ID NO: 3487 - RNA, 23 nt, synthetic construct
  source 1..23: mol_type = other RNA
tttggcgttattaattctacaga

SEQ ID NO: 3488 - RNA, 23 nt, synthetic construct
  source 1..23: mol_type = other RNA
ttggcgttattaattctacagag

SEQ ID NO: 3489 - RNA, 23 nt, synthetic construct
  source 1..23: mol_type = other RNA
tggcgttattaattctacagagg

SEQ ID NO: 3490 - RNA, 23 nt, synthetic construct
  source 1..23: mol_type = other RNA
ggcgttattaattctacagaggg

SEQ ID NO: 3491 - RNA, 23 nt, synthetic construct
  source 1..23: mol_type = other RNA
gcgttattaattctacagaggga

SEQ ID NO: 3492 - RNA, 23 nt, synthetic construct
  source 1..23: mol_type = other RNA
cgttattaattctacagagggag

SEQ ID NO: 3493 - RNA, 23 nt, synthetic construct
  source 1..23: mol_type = other RNA
gttattaattctacagagggagc

SEQ ID NO: 3494 - RNA, 23 nt, synthetic construct
  source 1..23: mol_type = other RNA
ttattaattctacagagggagca

SEQ ID NO: 3495 - RNA, 23 nt, synthetic construct
  source 1..23: mol_type = other RNA
tattaattctacagagggagcat

SEQ ID NO: 3496 - RNA, 23 nt, synthetic construct
  source 1..23: mol_type = other RNA
attaattctacagagggagcata

SEQ ID NO: 3497 - RNA, 23 nt, synthetic construct
  source 1..23: mol_type = other RNA
ttaattctacagagggagcataa

SEQ ID NO: 3498 - RNA, 23 nt, synthetic construct
  source 1..23: mol_type = other RNA
taattctacagagggagcataaa

SEQ ID NO: 3499 - RNA, 23 nt, synthetic construct
  source 1..23: mol_type = other RNA
aattctacagagggagcataaaa

SEQ ID NO: 3500 - RNA, 23 nt, synthetic construct
  source 1..23: mol_type = other RNA
attctacagagggagcataaaac

SEQ ID NO: 3501 - RNA, 23 nt, synthetic construct
  source 1..23: mol_type = other RNA
ttctacagagggagcataaaaca

SEQ ID NO: 3502 - RNA, 23 nt, synthetic construct
  source 1..23: mol_type = other RNA
tctacagagggagcataaaacat

SEQ ID NO: 3503 - RNA, 23 nt, synthetic construct
  source 1..23: mol_type = other RNA
ctacagagggagcataaaacatt

SEQ ID NO: 3504 - RNA, 23 nt, synthetic construct
  source 1..23: mol_type = other RNA
tacagagggagcataaaacattt

SEQ ID NO: 3505 - RNA, 23 nt, synthetic construct
  source 1..23: mol_type = other RNA
acagagggagcataaaacattta

SEQ ID NO: 3506 - RNA, 23 nt, synthetic construct
  source 1..23: mol_type = other RNA
cagagggagcataaaacatttaa

SEQ ID NO: 3507 - RNA, 23 nt, synthetic construct
  source 1..23: mol_type = other RNA
agagggagcataaaacatttaat

SEQ ID NO: 3508 - RNA, 23 nt, synthetic construct
  source 1..23: mol_type = other RNA
gagggagcataaaacatttaata

SEQ ID NO: 3509 - RNA, 23 nt, synthetic construct
  source 1..23: mol_type = other RNA
agggagcataaaacatttaataa

SEQ ID NO: 3510 - RNA, 23 nt, synthetic construct
  source 1..23: mol_type = other RNA
gggagcataaaacatttaataat

SEQ ID NO: 3511 - RNA, 23 nt, synthetic construct
  source 1..23: mol_type = other RNA
ggagcataaaacatttaataata

SEQ ID NO: 3512 - RNA, 24 nt, synthetic construct
  source 1..24: mol_type = other RNA
tgctaggattgtaattagtcttat

SEQ ID NO: 3513 - RNA, 24 nt, synthetic construct
  source 1..24: mol_type = other RNA
gctaggattgtaattagtcttatt

SEQ ID NO: 3514 - RNA, 24 nt, synthetic construct
  source 1..24: mol_type = other RNA
ctaggattgtaattagtcttattt

SEQ ID NO: 3515 - RNA, 24 nt, synthetic construct
  source 1..24: mol_type = other RNA
taggattgtaattagtcttatttg

SEQ ID NO: 3516 - RNA, 24 nt, synthetic construct
  source 1..24: mol_type = other RNA
aggattgtaattagtcttatttgg

SEQ ID NO: 3517 - RNA, 24 nt, synthetic construct
  source 1..24: mol_type = other RNA
ggattgtaattagtcttatttggc

SEQ ID NO: 3518 - RNA, 24 nt, synthetic construct
  source 1..24: mol_type = other RNA
gattgtaattagtcttatttggcg

SEQ ID NO: 3519 - RNA, 24 nt, synthetic construct
  source 1..24: mol_type = other RNA
attgtaattagtcttatttggcgt

SEQ ID NO: 3520 - RNA, 24 nt, synthetic construct
  source 1..24: mol_type = other RNA
ttgtaattagtcttatttggcgtt

SEQ ID NO: 3521 - RNA, 24 nt, synthetic construct
  source 1..24: mol_type = other RNA
tgtaattagtcttatttggcgtta

SEQ ID NO: 3522 - RNA, 24 nt, synthetic construct
  source 1..24: mol_type = other RNA
gtaattagtcttatttggcgttat

SEQ ID NO: 3523 - RNA, 24 nt, synthetic construct
  source 1..24: mol_type = other RNA
taattagtcttatttggcgttatt

SEQ ID NO: 3524 - RNA, 24 nt, synthetic construct
  source 1..24: mol_type = other RNA
aattagtcttatttggcgttatta

SEQ ID NO: 3525 - RNA, 24 nt, synthetic construct
  source 1..24: mol_type = other RNA
attagtcttatttggcgttattaa

SEQ ID NO: 3526 - RNA, 24 nt, synthetic construct
  source 1..24: mol_type = other RNA
ttagtcttatttggcgttattaat

SEQ ID NO: 3527 - RNA, 24 nt, synthetic construct
  source 1..24: mol_type = other RNA
tagtcttatttggcgttattaatt

SEQ ID NO: 3528 - RNA, 24 nt, synthetic construct
  source 1..24: mol_type = other RNA
agtcttatttggcgttattaattc

SEQ ID NO: 3529 - RNA, 24 nt, synthetic construct
  source 1..24: mol_type = other RNA
gtcttatttggcgttattaattct

SEQ ID NO: 3530 - RNA, 24 nt, synthetic construct
  source 1..24: mol_type = other RNA
tcttatttggcgttattaattcta

SEQ ID NO: 3531 - RNA, 24 nt, synthetic construct
  source 1..24: mol_type = other RNA
cttatttggcgttattaattctac

SEQ ID NO: 3532 - RNA, 24 nt, synthetic construct
  source 1..24: mol_type = other RNA
ttatttggcgttattaattctaca

SEQ ID NO: 3533 - RNA, 24 nt, synthetic construct
  source 1..24: mol_type = other RNA
tatttggcgttattaattctacag

SEQ ID NO: 3534 - RNA, 24 nt, synthetic construct
  source 1..24: mol_type = other RNA
atttggcgttattaattctacaga

SEQ ID NO: 3535 - RNA, 24 nt, synthetic construct
  source 1..24: mol_type = other RNA
tttggcgttattaattctacagag

SEQ ID NO: 3536 - RNA, 24 nt, synthetic construct
  source 1..24: mol_type = other RNA
ttggcgttattaattctacagagg

SEQ ID NO: 3537 - RNA, 24 nt, synthetic construct
  source 1..24: mol_type = other RNA
tggcgttattaattctacagaggg

SEQ ID NO: 3538 - RNA, 24 nt, synthetic construct
  source 1..24: mol_type = other RNA
ggcgttattaattctacagaggga

SEQ ID NO: 3539 - RNA, 24 nt, synthetic construct
  source 1..24: mol_type = other RNA
gcgttattaattctacagagggag

SEQ ID NO: 3540 - RNA, 24 nt, synthetic construct
  source 1..24: mol_type = other RNA
cgttattaattctacagagggagc

SEQ ID NO: 3541 - RNA, 24 nt, synthetic construct
  source 1..24: mol_type = other RNA
gttattaattctacagagggagca

SEQ ID NO: 3542 - RNA, 24 nt, synthetic construct
  source 1..24: mol_type = other RNA
ttattaattctacagagggagcat

SEQ ID NO: 3543 - RNA, 24 nt, synthetic construct
  source 1..24: mol_type = other RNA
tattaattctacagagggagcata

SEQ ID NO: 3544 - RNA, 24 nt, synthetic construct
  source 1..24: mol_type = other RNA
attaattctacagagggagcataa

SEQ ID NO: 3545 - RNA, 24 nt, synthetic construct
  source 1..24: mol_type = other RNA
ttaattctacagagggagcataaa

SEQ ID NO: 3546 - RNA, 24 nt, synthetic construct
  source 1..24: mol_type = other RNA
taattctacagagggagcataaaa

SEQ ID NO: 3547 - RNA, 24 nt, synthetic construct
  source 1..24: mol_type = other RNA
aattctacagagggagcataaaac

SEQ ID NO: 3548 - RNA, 24 nt, synthetic construct
  source 1..24: mol_type = other RNA
attctacagagggagcataaaaca

SEQ ID NO: 3549 - RNA, 24 nt, synthetic construct
  source 1..24: mol_type = other RNA
ttctacagagggagcataaaacat

SEQ ID NO: 3550 - RNA, 24 nt, synthetic construct
  source 1..24: mol_type = other RNA
tctacagagggagcataaaacatt

SEQ ID NO: 3551 - RNA, 24 nt, synthetic construct
  source 1..24: mol_type = other RNA
ctacagagggagcataaaacattt

SEQ ID NO: 3552 - RNA, 24 nt, synthetic construct
  source 1..24: mol_type = other RNA
tacagagggagcataaaacattta

SEQ ID NO: 3553 - RNA, 24 nt, synthetic construct
  source 1..24: mol_type = other RNA
acagagggagcataaaacatttaa

SEQ ID NO: 3554 - RNA, 24 nt, synthetic construct
  source 1..24: mol_type = other RNA
cagagggagcataaaacatttaat

SEQ ID NO: 3555 - RNA, 24 nt, synthetic construct
  source 1..24: mol_type = other RNA
agagggagcataaaacatttaata

SEQ ID NO: 3556 - RNA, 24 nt, synthetic construct
  source 1..24: mol_type = other RNA
gagggagcataaaacatttaataa

SEQ ID NO: 3557 - RNA, 24 nt, synthetic construct
  source 1..24: mol_type = other RNA
agggagcataaaacatttaataat

SEQ ID NO: 3558 - RNA, 24 nt, synthetic construct
  source 1..24: mol_type = other RNA
gggagcataaaacatttaataata

SEQ ID NO: 3559 - RNA, 25 nt, synthetic construct
  source 1..25: mol_type = other RNA
tgctaggattgtaattagtcttatt

SEQ ID NO: 3560 - RNA, 25 nt, synthetic construct
  source 1..25: mol_type = other RNA
gctaggattgtaattagtcttattt

SEQ ID NO: 3561 - RNA, 25 nt, synthetic construct
  source 1..25: mol_type = other RNA
ctaggattgtaattagtcttatttg

SEQ ID NO: 3562 - RNA, 25 nt, synthetic construct
  source 1..25: mol_type = other RNA
taggattgtaattagtcttatttgg

SEQ ID NO: 3563 - RNA, 25 nt, synthetic construct
  source 1..25: mol_type = other RNA
aggattgtaattagtcttatttggc

SEQ ID NO: 3564 - RNA, 25 nt, synthetic construct
  source 1..25: mol_type = other RNA
ggattgtaattagtcttatttggcg

SEQ ID NO: 3565 - RNA, 25 nt, synthetic construct
  source 1..25: mol_type = other RNA
gattgtaattagtcttatttggcgt

SEQ ID NO: 3566 - RNA, 25 nt, synthetic construct
  source 1..25: mol_type = other RNA
attgtaattagtcttatttggcgtt

SEQ ID NO: 3567 - RNA, 25 nt, synthetic construct
  source 1..25: mol_type = other RNA
ttgtaattagtcttatttggcgtta

SEQ ID NO: 3568 - RNA, 25 nt, synthetic construct
  source 1..25: mol_type = other RNA
tgtaattagtcttatttggcgttat

SEQ ID NO: 3569 - RNA, 25 nt, synthetic construct
  source 1..25: mol_type = other RNA
gtaattagtcttatttggcgttatt

SEQ ID NO: 3570 - RNA, 25 nt, synthetic construct
  source 1..25: mol_type = other RNA
taattagtcttatttggcgttatta

SEQ ID NO: 3571 - RNA, 25 nt, synthetic construct
  source 1..25: mol_type = other RNA
aattagtcttatttggcgttattaa

SEQ ID NO: 3572 - RNA, 25 nt, synthetic construct
  source 1..25: mol_type = other RNA
attagtcttatttggcgttattaat

SEQ ID NO: 3573 - RNA, 25 nt, synthetic construct
  source 1..25: mol_type = other RNA
ttagtcttatttggcgttattaatt

SEQ ID NO: 3574 - RNA, 25 nt, synthetic construct
  source 1..25: mol_type = other RNA
tagtcttatttggcgttattaattc

SEQ ID NO: 3575 - RNA, 25 nt, synthetic construct
  source 1..25: mol_type = other RNA
agtcttatttggcgttattaattct

SEQ ID NO: 3576 - RNA, 25 nt, synthetic construct
  source 1..25: mol_type = other RNA
gtcttatttggcgttattaattcta

SEQ ID NO: 3577 - RNA, 25 nt, synthetic construct
  source 1..25: mol_type = other RNA
tcttatttggcgttattaattctac

SEQ ID NO: 3578 - RNA, 25 nt, synthetic construct
  source 1..25: mol_type = other RNA
cttatttggcgttattaattctaca

SEQ ID NO: 3579 - RNA, 25 nt, synthetic construct
  source 1..25: mol_type = other RNA
ttatttggcgttattaattctacag

SEQ ID NO: 3580 - RNA, 25 nt, synthetic construct
  source 1..25: mol_type = other RNA
tatttggcgttattaattctacaga

SEQ ID NO: 3581 - RNA, 25 nt, synthetic construct
  source 1..25: mol_type = other RNA
atttggcgttattaattctacagag

SEQ ID NO: 3582 - RNA, 25 nt, synthetic construct
  source 1..25: mol_type = other RNA
tttggcgttattaattctacagagg

SEQ ID NO: 3583 - RNA, 25 nt, synthetic construct
  source 1..25: mol_type = other RNA
ttggcgttattaattctacagaggg

SEQ ID NO: 3584 - RNA, 25 nt, synthetic construct
  source 1..25: mol_type = other RNA
tggcgttattaattctacagaggga

SEQ ID NO: 3585 - RNA, 25 nt, synthetic construct
  source 1..25: mol_type = other RNA
ggcgttattaattctacagagggag

SEQ ID NO: 3586 - RNA, 25 nt, synthetic construct
  source 1..25: mol_type = other RNA
gcgttattaattctacagagggagc

SEQ ID NO: 3587 - RNA, 25 nt, synthetic construct
  source 1..25: mol_type = other RNA
cgttattaattctacagagggagca

SEQ ID NO: 3588 - RNA, 25 nt, synthetic construct
  source 1..25: mol_type = other RNA
gttattaattctacagagggagcat

SEQ ID NO: 3589 - RNA, 25 nt, synthetic construct
  source 1..25: mol_type = other RNA
ttattaattctacagagggagcata

SEQ ID NO: 3590 - RNA, 25 nt, synthetic construct
  source 1..25: mol_type = other RNA
tattaattctacagagggagcataa

SEQ ID NO: 3591 - RNA, 25 nt, synthetic construct
  source 1..25: mol_type = other RNA
attaattctacagagggagcataaa

SEQ ID NO: 3592 - RNA, 25 nt, synthetic construct
  source 1..25: mol_type = other RNA
ttaattctacagagggagcataaaa

SEQ ID NO: 3593 - RNA, 25 nt, synthetic construct
  source 1..25: mol_type = other RNA
taattctacagagggagcataaaac

SEQ ID NO: 3594 - RNA, 25 nt, synthetic construct
  source 1..25: mol_type = other RNA
aattctacagagggagcataaaaca

SEQ ID NO: 3595 - RNA, 25 nt, synthetic construct
  source 1..25: mol_type = other RNA
attctacagagggagcataaaacat

SEQ ID NO: 3596 - RNA, 25 nt, synthetic construct
  source 1..25: mol_type = other RNA
ttctacagagggagcataaaacatt

SEQ ID NO: 3597 - RNA, 25 nt, synthetic construct
  source 1..25: mol_type = other RNA
tctacagagggagcataaaacattt

SEQ ID NO: 3598 - RNA, 25 nt, synthetic construct
  source 1..25: mol_type = other RNA
ctacagagggagcataaaacattta

SEQ ID NO: 3599 - RNA, 25 nt, synthetic construct
  source 1..25: mol_type = other RNA
tacagagggagcataaaacatttaa

SEQ ID NO: 3600 - RNA, 25 nt, synthetic construct
  source 1..25: mol_type = other RNA
acagagggagcataaaacatttaat

SEQ ID NO: 3601 - RNA, 25 nt, synthetic construct
  source 1..25: mol_type = other RNA
cagagggagcataaaacatttaata

SEQ ID NO: 3602 - RNA, 25 nt, synthetic construct
  source 1..25: mol_type = other RNA
agagggagcataaaacatttaataa

SEQ ID NO: 3603 - RNA, 25 nt, synthetic construct
  source 1..25: mol_type = other RNA
gagggagcataaaacatttaataat

SEQ ID NO: 3604 - RNA, 25 nt, synthetic construct
  source 1..25: mol_type = other RNA
agggagcataaaacatttaataata

SEQ ID NO: 3605 - RNA, 26 nt, synthetic construct
  source 1..26: mol_type = other RNA
tgctaggattgtaattagtcttattt

SEQ ID NO: 3606 - RNA, 26 nt, synthetic construct
  source 1..26: mol_type = other RNA
gctaggattgtaattagtcttatttg

SEQ ID NO: 3607 - RNA, 26 nt, synthetic construct
  source 1..26: mol_type = other RNA
ctaggattgtaattagtcttatttgg

SEQ ID NO: 3608 - RNA, 26 nt, synthetic construct
  source 1..26: mol_type = other RNA
taggattgtaattagtcttatttggc

SEQ ID NO: 3609 - RNA, 26 nt, synthetic construct
  source 1..26: mol_type = other RNA
aggattgtaattagtcttatttggcg

SEQ ID NO: 3610 - RNA, 26 nt, synthetic construct
  source 1..26: mol_type = other RNA
ggattgtaattagtcttatttggcgt

SEQ ID NO: 3611 - RNA, 26 nt, synthetic construct
  source 1..26: mol_type = other RNA
gattgtaattagtcttatttggcgtt

SEQ ID NO: 3612 - RNA, 26 nt, synthetic construct
  source 1..26: mol_type = other RNA
attgtaattagtcttatttggcgtta

SEQ ID NO: 3613 - RNA, 26 nt, synthetic construct
  source 1..26: mol_type = other RNA
ttgtaattagtcttatttggcgttat

SEQ ID NO: 3614 - RNA, 26 nt, synthetic construct
  source 1..26: mol_type = other RNA
tgtaattagtcttatttggcgttatt

SEQ ID NO: 3615 - RNA, 26 nt, synthetic construct
  source 1..26: mol_type = other RNA
gtaattagtcttatttggcgttatta

SEQ ID NO: 3616 - RNA, 26 nt, synthetic construct
  source 1..26: mol_type = other RNA
taattagtcttatttggcgttattaa

SEQ ID NO: 3617 - RNA, 26 nt, synthetic construct
  source 1..26: mol_type = other RNA
aattagtcttatttggcgttattaat

SEQ ID NO: 3618 - RNA, 26 nt, synthetic construct
  source 1..26: mol_type = other RNA
attagtcttatttggcgttattaatt

SEQ ID NO: 3619 - RNA, 26 nt, synthetic construct
  source 1..26: mol_type = other RNA
ttagtcttatttggcgttattaattc

SEQ ID NO: 3620 - RNA, 26 nt, synthetic construct
  source 1..26: mol_type = other RNA
tagtcttatttggcgttattaattct

SEQ ID NO: 3621 - RNA, 26 nt, synthetic construct
  source 1..26: mol_type = other RNA
agtcttatttggcgttattaattcta

SEQ ID NO: 3622 - RNA, 26 nt, synthetic construct
  source 1..26: mol_type = other RNA
gtcttatttggcgttattaattctac

SEQ ID NO: 3623 - RNA, 26 nt, synthetic construct
  source 1..26: mol_type = other RNA
tcttatttggcgttattaattctaca

SEQ ID NO: 3624 - RNA, 26 nt, synthetic construct
  source 1..26: mol_type = other RNA
cttatttggcgttattaattctacag

SEQ ID NO: 3625 - RNA, 26 nt, synthetic construct
  source 1..26: mol_type = other RNA
ttatttggcgttattaattctacaga

SEQ ID NO: 3626 - RNA, 26 nt, synthetic construct
  source 1..26: mol_type = other RNA
tatttggcgttattaattctacagag

SEQ ID NO: 3627 - RNA, 26 nt, synthetic construct
  source 1..26: mol_type = other RNA
atttggcgttattaattctacagagg

SEQ ID NO: 3628 - RNA, 26 nt, synthetic construct
  source 1..26: mol_type = other RNA
tttggcgttattaattctacagaggg

SEQ ID NO: 3629 - RNA, 26 nt, synthetic construct
  source 1..26: mol_type = other RNA
ttggcgttattaattctacagaggga

SEQ ID NO: 3630 - RNA, 26 nt, synthetic construct
  source 1..26: mol_type = other RNA
tggcgttattaattctacagagggag

SEQ ID NO: 3631 - RNA, 26 nt, synthetic construct
  source 1..26: mol_type = other RNA
ggcgttattaattctacagagggagc

SEQ ID NO: 3632 - RNA, 26 nt, synthetic construct
  source 1..26: mol_type = other RNA
gcgttattaattctacagagggagca

SEQ ID NO: 3633 - RNA, 26 nt, synthetic construct
  source 1..26: mol_type = other RNA
cgttattaattctacagagggagcat

SEQ ID NO: 3634 - RNA, 26 nt, synthetic construct
  source 1..26: mol_type = other RNA
gttattaattctacagagggagcata

SEQ ID NO: 3635 - RNA, 26 nt, synthetic construct
  source 1..26: mol_type = other RNA
ttattaattctacagagggagcataa

SEQ ID NO: 3636 - RNA, 26 nt, synthetic construct
  source 1..26: mol_type = other RNA
tattaattctacagagggagcataaa

SEQ ID NO: 3637 - RNA, 26 nt, synthetic construct
  source 1..26: mol_type = other RNA
attaattctacagagggagcataaaa

SEQ ID NO: 3638 - RNA, 26 nt, synthetic construct
  source 1..26: mol_type = other RNA
ttaattctacagagggagcataaaac

SEQ ID NO: 3639 - RNA, 26 nt, synthetic construct
  source 1..26: mol_type = other RNA
taattctacagagggagcataaaaca

SEQ ID NO: 3640 - RNA, 26 nt, synthetic construct
  source 1..26: mol_type = other RNA
aattctacagagggagcataaaacat

SEQ ID NO: 3641 - RNA, 26 nt, synthetic construct
  source 1..26: mol_type = other RNA
attctacagagggagcataaaacatt

SEQ ID NO: 3642 - RNA, 26 nt, synthetic construct
  source 1..26: mol_type = other RNA
ttctacagagggagcataaaacattt

SEQ ID NO: 3643 - RNA, 26 nt, synthetic construct
  source 1..26: mol_type = other RNA
tctacagagggagcataaaacattta

SEQ ID NO: 3644 - RNA, 26 nt, synthetic construct
  source 1..26: mol_type = other RNA
ctacagagggagcataaaacatttaa

SEQ ID NO: 3645 - RNA, 26 nt, synthetic construct
  source 1..26: mol_type = other RNA
tacagagggagcataaaacatttaat

SEQ ID NO: 3646 - RNA, 26 nt, synthetic construct
  source 1..26: mol_type = other RNA
acagagggagcataaaacatttaata

SEQ ID NO: 3647 - RNA, 26 nt, synthetic construct
  source 1..26: mol_type = other RNA
cagagggagcataaaacatttaataa

SEQ ID NO: 3648 - RNA, 26 nt, synthetic construct
  source 1..26: mol_type = other RNA
agagggagcataaaacatttaataat

SEQ ID NO: 3649 - RNA, 26 nt, synthetic construct
  source 1..26: mol_type = other RNA
gagggagcataaaacatttaataata

SEQ ID NO: 3650 - RNA, 18 nt, synthetic construct
  source 1..18: mol_type = other RNA
cattggacttactcaact

SEQ ID NO: 3651 - RNA, 18 nt, synthetic construct
  source 1..18: mol_type = other RNA
attggacttactcaactc

SEQ ID NO: 3652 - RNA, 18 nt, synthetic construct
  source 1..18: mol_type = other RNA
ttggacttactcaactca

SEQ ID NO: 3653 - RNA, 18 nt, synthetic construct
  source 1..18: mol_type = other RNA
gacttactcaactcacta

SEQ ID NO: 3654 - RNA, 18 nt, synthetic construct
  source 1..18: mol_type = other RNA
acttactcaactcactat

SEQ ID NO: 3655 - RNA, 18 nt, synthetic construct
  source 1..18: mol_type = other RNA
tatttcttactttcgtcc

SEQ ID NO: 3656 - RNA, 18 nt, synthetic construct
  source 1..18: mol_type = other RNA
cttactttcgtccttaag

SEQ ID NO: 3657 - RNA, 19 nt, synthetic construct
  source 1..19: mol_type = other RNA
ataatacattggacttact

SEQ ID NO: 3658 - RNA, 19 nt, synthetic construct
  source 1..19: mol_type = other RNA
taatacattggacttactc

SEQ ID NO: 3659 - RNA, 19 nt, synthetic construct
  source 1..19: mol_type = other RNA
tacattggacttactcaac

SEQ ID NO: 3660 - RNA, 19 nt, synthetic construct
  source 1..19: mol_type = other RNA
acattggacttactcaact

SEQ ID NO: 3661 - RNA, 19 nt, synthetic construct
  source 1..19: mol_type = other RNA
cattggacttactcaactc

SEQ ID NO: 3662 - RNA, 19 nt, synthetic construct
  source 1..19: mol_type = other RNA
attggacttactcaactca

SEQ ID NO: 3663 - RNA, 19 nt, synthetic construct
  source 1..19: mol_type = other RNA
ttggacttactcaactcac

SEQ ID NO: 3664 - RNA, 19 nt, synthetic construct
  source 1..19: mol_type = other RNA
ggacttactcaactcacta

SEQ ID NO: 3665 - RNA, 19 nt, synthetic construct
  source 1..19: mol_type = other RNA
gacttactcaactcactat

SEQ ID NO: 3666 - RNA, 19 nt, synthetic construct
  source 1..19: mol_type = other RNA
acttactcaactcactatt

SEQ ID NO: 3667 - RNA, 19 nt, synthetic construct
  source 1..19: mol_type = other RNA
ttactcaactcactatttc

SEQ ID NO: 3668 - RNA, 19 nt, synthetic construct
  source 1..19: mol_type = other RNA
aactcactatttcttactt

SEQ ID NO: 3669 - RNA, 19 nt, synthetic construct
  source 1..19: mol_type = other RNA
tcactatttcttactttcg

SEQ ID NO: 3670 - RNA, 19 nt, synthetic construct
  source 1..19: mol_type = other RNA
actatttcttactttcgtc

SEQ ID NO: 3671 - RNA, 19 nt, synthetic construct
  source 1..19: mol_type = other RNA
ctatttcttactttcgtcc

SEQ ID NO: 3672 - RNA, 19 nt, synthetic construct
  source 1..19: mol_type = other RNA
tatttcttactttcgtcct

SEQ ID NO: 3673 - RNA, 19 nt, synthetic construct
  source 1..19: mol_type = other RNA
atttcttactttcgtcctt

SEQ ID NO: 3674 - RNA, 19 nt, synthetic construct
  source 1..19: mol_type = other RNA
tcttactttcgtccttaag

SEQ ID NO: 3675 - RNA, 20 nt, synthetic construct
  source 1..20: mol_type = other RNA
ttaataatacattggactta

SEQ ID NO: 3676 - RNA, 20 nt, synthetic construct
  source 1..20: mol_type = other RNA
aataatacattggacttact

SEQ ID NO: 3677 - RNA, 20 nt, synthetic construct
  source 1..20: mol_type = other RNA
taatacattggacttactca

SEQ ID NO: 3678 - RNA, 20 nt, synthetic construct
  source 1..20: mol_type = other RNA
aatacattggacttactcaa

SEQ ID NO: 3679 - RNA, 20 nt, synthetic construct
  source 1..20: mol_type = other RNA
atacattggacttactcaac

SEQ ID NO: 3680 - RNA, 20 nt, synthetic construct
  source 1..20: mol_type = other RNA
tacattggacttactcaact

SEQ ID NO: 3681 - RNA, 20 nt, synthetic construct
  source 1..20: mol_type = other RNA
acattggacttactcaactc

SEQ ID NO: 3682 - RNA, 20 nt, synthetic construct
  source 1..20: mol_type = other RNA
cattggacttactcaactca

SEQ ID NO: 3683 - RNA, 20 nt, synthetic construct
  source 1..20: mol_type = other RNA
attggacttactcaactcac

SEQ ID NO: 3684 - RNA, 20 nt, synthetic construct
  source 1..20: mol_type = other RNA
ttggacttactcaactcact

SEQ ID NO: 3685 - RNA, 20 nt, synthetic construct
  source 1..20: mol_type = other RNA
tggacttactcaactcacta

SEQ ID NO: 3686 - RNA, 20 nt, synthetic construct
  source 1..20: mol_type = other RNA
gacttactcaactcactatt

SEQ ID NO: 3687 - RNA, 20 nt, synthetic construct
  source 1..20: mol_type = other RNA
acttactcaactcactattt

SEQ ID NO: 3688 - RNA, 20 nt, synthetic construct
  source 1..20: mol_type = other RNA
cttactcaactcactatttc

SEQ ID NO: 3689 - RNA, 20 nt, synthetic construct
  source 1..20: mol_type = other RNA
ttactcaactcactatttct

SEQ ID NO: 3690 - RNA, 20 nt, synthetic construct
  source 1..20: mol_type = other RNA
tactcaactcactatttctt

SEQ ID NO: 3691 - RNA, 20 nt, synthetic construct
  source 1..20: mol_type = other RNA
caactcactatttcttactt

SEQ ID NO: 3692 - RNA, 20 nt, synthetic construct
  source 1..20: mol_type = other RNA
aactcactatttcttacttt

SEQ ID NO: 3693 - RNA, 20 nt, synthetic construct
  source 1..20: mol_type = other RNA
ctcactatttcttactttcg

SEQ ID NO: 3694 - RNA, 20 nt, synthetic construct
  source 1..20: mol_type = other RNA
tcactatttcttactttcgt

SEQ ID NO: 3695 - RNA, 20 nt, synthetic construct
  source 1..20: mol_type = other RNA
actatttcttactttcgtcc

SEQ ID NO: 3696 - RNA, 20 nt, synthetic construct
  source 1..20: mol_type = other RNA
ctatttcttactttcgtcct

SEQ ID NO: 3697 - RNA, 20 nt, synthetic construct
  source 1..20: mol_type = other RNA
tatttcttactttcgtcctt

SEQ ID NO: 3698 - RNA, 20 nt, synthetic construct
  source 1..20: mol_type = other RNA
atttcttactttcgtcctta

SEQ ID NO: 3699 - RNA, 20 nt, synthetic construct
  source 1..20: mol_type = other RNA
ttcttactttcgtccttaag

SEQ ID NO: 3700 - RNA, 21 nt, synthetic construct
  source 1..21: mol_type = other RNA
aaaacatttaataatacattg

SEQ ID NO: 3701 - RNA, 21 nt, synthetic construct
  source 1..21: mol_type = other RNA
aaacatttaataatacattgg

SEQ ID NO: 3702 - RNA, 21 nt, synthetic construct
  source 1..21: mol_type = other RNA
aacatttaataatacattgga

SEQ ID NO: 3703 - RNA, 21 nt, synthetic construct
  source 1..21: mol_type = other RNA
acatttaataatacattggac

SEQ ID NO: 3704 - RNA, 21 nt, synthetic construct
  source 1..21: mol_type = other RNA
atttaataatacattggactt

SEQ ID NO: 3705 - RNA, 21 nt, synthetic construct
  source 1..21: mol_type = other RNA
tttaataatacattggactta

SEQ ID NO: 3706 - RNA, 21 nt, synthetic construct
  source 1..21: mol_type = other RNA
ttaataatacattggacttac

SEQ ID NO: 3707 - RNA, 21 nt, synthetic construct
  source 1..21: mol_type = other RNA
taataatacattggacttact

SEQ ID NO: 3708 - RNA, 21 nt, synthetic construct
  source 1..21: mol_type = other RNA
aataatacattggacttactc

SEQ ID NO: 3709 - RNA, 21 nt, synthetic construct
  source 1..21: mol_type = other RNA
ataatacattggacttactca

SEQ ID NO: 3710 - RNA, 21 nt, synthetic construct
  source 1..21: mol_type = other RNA
taatacattggacttactcaa

SEQ ID NO: 3711 - RNA, 21 nt, synthetic construct
  source 1..21: mol_type = other RNA
aatacattggacttactcaac

SEQ ID NO: 3712 - RNA, 21 nt, synthetic construct
  source 1..21: mol_type = other RNA
atacattggacttactcaact

SEQ ID NO: 3713 - RNA, 21 nt, synthetic construct
  source 1..21: mol_type = other RNA
tacattggacttactcaactc

SEQ ID NO: 3714 - RNA, 21 nt, synthetic construct
  source 1..21: mol_type = other RNA
acattggacttactcaactca

SEQ ID NO: 3715 - RNA, 21 nt, synthetic construct
  source 1..21: mol_type = other RNA
cattggacttactcaactcac

SEQ ID NO: 3716 - RNA, 21 nt, synthetic construct
  source 1..21: mol_type = other RNA
attggacttactcaactcact

SEQ ID NO: 3717 - RNA, 21 nt, synthetic construct
  source 1..21: mol_type = other RNA
ttggacttactcaactcacta

SEQ ID NO: 3718 - RNA, 21 nt, synthetic construct
  source 1..21: mol_type = other RNA
tggacttactcaactcactat

SEQ ID NO: 3719 - RNA, 21 nt, synthetic construct
  source 1..21: mol_type = other RNA
ggacttactcaactcactatt

SEQ ID NO: 3720 - RNA, 21 nt, synthetic construct
  source 1..21: mol_type = other RNA
gacttactcaactcactattt

SEQ ID NO: 3721 - RNA, 21 nt, synthetic construct
  source 1..21: mol_type = other RNA
acttactcaactcactatttc

SEQ ID NO: 3722 - RNA, 21 nt, synthetic construct
  source 1..21: mol_type = other RNA
cttactcaactcactatttct

SEQ ID NO: 3723 - RNA, 21 nt, synthetic construct
  source 1..21: mol_type = other RNA
ttactcaactcactatttctt

SEQ ID NO: 3724 - RNA, 21 nt, synthetic construct
  source 1..21: mol_type = other RNA
tactcaactcactatttctta

SEQ ID NO: 3725 - RNA, 21 nt, synthetic construct
  source 1..21: mol_type = other RNA
actcaactcactatttcttac

SEQ ID NO: 3726 - RNA, 21 nt, synthetic construct
  source 1..21: mol_type = other RNA
ctcaactcactatttcttact

SEQ ID NO: 3727 - RNA, 21 nt, synthetic construct
  source 1..21: mol_type = other RNA
tcaactcactatttcttactt

SEQ ID NO: 3728 - RNA, 21 nt, synthetic construct
  source 1..21: mol_type = other RNA
caactcactatttcttacttt

SEQ ID NO: 3729 - RNA, 21 nt, synthetic construct
  source 1..21: mol_type = other RNA
aactcactatttcttactttc

SEQ ID NO: 3730 - RNA, 21 nt, synthetic construct
  source 1..21: mol_type = other RNA
actcactatttcttactttcg

SEQ ID NO: 3731 - RNA, 21 nt, synthetic construct
  source 1..21: mol_type = other RNA
ctcactatttcttactttcgt

SEQ ID NO: 3732 - RNA, 21 nt, synthetic construct
  source 1..21: mol_type = other RNA
tcactatttcttactttcgtc

SEQ ID NO: 3733 - RNA, 21 nt, synthetic construct
  source 1..21: mol_type = other RNA
cactatttcttactttcgtcc

SEQ ID NO: 3734 - RNA, 21 nt, synthetic construct
  source 1..21: mol_type = other RNA
actatttcttactttcgtcct

SEQ ID NO: 3735 - RNA, 21 nt, synthetic construct
  source 1..21: mol_type = other RNA
ctatttcttactttcgtcctt

SEQ ID NO: 3736 - RNA, 21 nt, synthetic construct
  source 1..21: mol_type = other RNA
tatttcttactttcgtcctta

SEQ ID NO: 3737 - RNA, 21 nt, synthetic construct
  source 1..21: mol_type = other RNA
atttcttactttcgtccttaa

SEQ ID NO: 3738 - RNA, 21 nt, synthetic construct
  source 1..21: mol_type = other RNA
tttcttactttcgtccttaag

SEQ ID NO: 3739 - RNA, 22 nt, synthetic construct
  source 1..22: mol_type = other RNA
gcataaaacatttaataataca

SEQ ID NO: 3740 - RNA, 22 nt, synthetic construct
  source 1..22: mol_type = other RNA
cataaaacatttaataatacat

SEQ ID NO: 3741 - RNA, 22 nt, synthetic construct
  source 1..22: mol_type = other RNA
taaaacatttaataatacattg

SEQ ID NO: 3742 - RNA, 22 nt, synthetic construct
  source 1..22: mol_type = other RNA
aaaacatttaataatacattgg

SEQ ID NO: 3743 - RNA, 22 nt, synthetic construct
  source 1..22: mol_type = other RNA
aaacatttaataatacattgga

SEQ ID NO: 3744 - RNA, 22 nt, synthetic construct
  source 1..22: mol_type = other RNA
aacatttaataatacattggac

SEQ ID NO: 3745 - RNA, 22 nt, synthetic construct
  source 1..22: mol_type = other RNA
acatttaataatacattggact

SEQ ID NO: 3746 - RNA, 22 nt, synthetic construct
  source 1..22: mol_type = other RNA
catttaataatacattggactt

SEQ ID NO: 3747 - RNA, 22 nt, synthetic construct
  source 1..22: mol_type = other RNA
atttaataatacattggactta

SEQ ID NO: 3748 - RNA, 22 nt, synthetic construct
  source 1..22: mol_type = other RNA
tttaataatacattggacttac

SEQ ID NO: 3749 - RNA, 22 nt, synthetic construct
  source 1..22: mol_type = other RNA
ttaataatacattggacttact

SEQ ID NO: 3750 - RNA, 22 nt, synthetic construct
  source 1..22: mol_type = other RNA
taataatacattggacttactc

SEQ ID NO: 3751 - RNA, 22 nt, synthetic construct
  source 1..22: mol_type = other RNA
aataatacattggacttactca

SEQ ID NO: 3752 - RNA, 22 nt, synthetic construct
  source 1..22: mol_type = other RNA
ataatacattggacttactcaa

SEQ ID NO: 3753 - RNA, 22 nt, synthetic construct
  source 1..22: mol_type = other RNA
taatacattggacttactcaac

SEQ ID NO: 3754 - RNA, 22 nt, synthetic construct
  source 1..22: mol_type = other RNA
aatacattggacttactcaact

SEQ ID NO: 3755 - RNA, 22 nt, synthetic construct
  source 1..22: mol_type = other RNA
atacattggacttactcaactc

SEQ ID NO: 3756 - RNA, 22 nt, synthetic construct
  source 1..22: mol_type = other RNA
tacattggacttactcaactca

SEQ ID NO: 3757 - RNA, 22 nt, synthetic construct
  source 1..22: mol_type = other RNA
acattggacttactcaactcac

SEQ ID NO: 3758 - RNA, 22 nt, synthetic construct
  source 1..22: mol_type = other RNA
cattggacttactcaactcact

SEQ ID NO: 3759 - RNA, 22 nt, synthetic construct
  source 1..22: mol_type = other RNA
attggacttactcaactcacta

SEQ ID NO: 3760 - RNA, 22 nt, synthetic construct
  source 1..22: mol_type = other RNA
ttggacttactcaactcactat

SEQ ID NO: 3761 - RNA, 22 nt, synthetic construct
  source 1..22: mol_type = other RNA
tggacttactcaactcactatt

SEQ ID NO: 3762 - RNA, 22 nt, synthetic construct
  source 1..22: mol_type = other RNA
ggacttactcaactcactattt

SEQ ID NO: 3763 - RNA, 22 nt, synthetic construct
  source 1..22: mol_type = other RNA
gacttactcaactcactatttc

SEQ ID NO: 3764 - RNA, 22 nt, synthetic construct
  source 1..22: mol_type = other RNA
acttactcaactcactatttct

SEQ ID NO: 3765 - RNA, 22 nt, synthetic construct
  source 1..22: mol_type = other RNA
cttactcaactcactatttctt

SEQ ID NO: 3766 - RNA, 22 nt, synthetic construct
  source 1..22: mol_type = other RNA
ttactcaactcactatttctta

SEQ ID NO: 3767 - RNA, 22 nt, synthetic construct
  source 1..22: mol_type = other RNA
tactcaactcactatttcttac

SEQ ID NO: 3768 - RNA, 22 nt, synthetic construct
  source 1..22: mol_type = other RNA
actcaactcactatttcttact

SEQ ID NO: 3769 - RNA, 22 nt, synthetic construct
  source 1..22: mol_type = other RNA
ctcaactcactatttcttactt

SEQ ID NO: 3770 - RNA, 22 nt, synthetic construct
  source 1..22: mol_type = other RNA
tcaactcactatttcttacttt

SEQ ID NO: 3771 - RNA, 22 nt, synthetic construct
  source 1..22: mol_type = other RNA
caactcactatttcttactttc

SEQ ID NO: 3772 - RNA, 22 nt, synthetic construct
  source 1..22: mol_type = other RNA
aactcactatttcttactttcg

SEQ ID NO: 3773 - RNA, 22 nt, synthetic construct
  source 1..22: mol_type = other RNA
actcactatttcttactttcgt

SEQ ID NO: 3774 - RNA, 22 nt, synthetic construct
  source 1..22: mol_type = other RNA
ctcactatttcttactttcgtc

SEQ ID NO: 3775 - RNA, 22 nt, synthetic construct
  source 1..22: mol_type = other RNA
tcactatttcttactttcgtcc

SEQ ID NO: 3776 - RNA, 22 nt, synthetic construct
  source 1..22: mol_type = other RNA
cactatttcttactttcgtcct

SEQ ID NO: 3777 - RNA, 22 nt, synthetic construct
  source 1..22: mol_type = other RNA
actatttcttactttcgtcctt

SEQ ID NO: 3778 - RNA, 22 nt, synthetic construct
  source 1..22: mol_type = other RNA
ctatttcttactttcgtcctta

SEQ ID NO: 3779 - RNA, 22 nt, synthetic construct
  source 1..22: mol_type = other RNA
tatttcttactttcgtccttaa

SEQ ID NO: 3780 - RNA, 22 nt, synthetic construct
  source 1..22: mol_type = other RNA
atttcttactttcgtccttaag

SEQ ID NO: 3781 - RNA, 23 nt, synthetic construct
  source 1..23: mol_type = other RNA
gagcataaaacatttaataatac

SEQ ID NO: 3782 - RNA, 23 nt, synthetic construct
  source 1..23: mol_type = other RNA
agcataaaacatttaataataca

SEQ ID NO: 3783 - RNA, 23 nt, synthetic construct
  source 1..23: mol_type = other RNA
gcataaaacatttaataatacat

SEQ ID NO: 3784 - RNA, 23 nt, synthetic construct
  source 1..23: mol_type = other RNA
cataaaacatttaataatacatt

SEQ ID NO: 3785 - RNA, 23 nt, synthetic construct
  source 1..23: mol_type = other RNA
ataaaacatttaataatacattg

SEQ ID NO: 3786 - RNA, 23 nt, synthetic construct
  source 1..23: mol_type = other RNA
taaaacatttaataatacattgg

SEQ ID NO: 3787 - RNA, 23 nt, synthetic construct
  source 1..23: mol_type = other RNA
aaaacatttaataatacattgga

SEQ ID NO: 3788 - RNA, 23 nt, synthetic construct
  source 1..23: mol_type = other RNA
aaacatttaataatacattggac

SEQ ID NO: 3789 - RNA, 23 nt, synthetic construct
  source 1..23: mol_type = other RNA
aacatttaataatacattggact

SEQ ID NO: 3790 - RNA, 23 nt, synthetic construct
  source 1..23: mol_type = other RNA
acatttaataatacattggactt

SEQ ID NO: 3791 - RNA, 23 nt, synthetic construct
  source 1..23: mol_type = other RNA
catttaataatacattggactta

SEQ ID NO: 3792 - RNA, 23 nt, synthetic construct
  source 1..23: mol_type = other RNA
atttaataatacattggacttac

SEQ ID NO: 3793 - RNA, 23 nt, synthetic construct
  source 1..23: mol_type = other RNA
tttaataatacattggacttact

SEQ ID NO: 3794 - RNA, 23 nt, synthetic construct
  source 1..23: mol_type = other RNA
ttaataatacattggacttactc

SEQ ID NO: 3795 - RNA, 23 nt, synthetic construct
  source 1..23: mol_type = other RNA
taataatacattggacttactca

SEQ ID NO: 3796 - RNA, 23 nt, synthetic construct
  source 1..23: mol_type = other RNA
aataatacattggacttactcaa

SEQ ID NO: 3797 - RNA, 23 nt, synthetic construct
  source 1..23: mol_type = other RNA
ataatacattggacttactcaac

SEQ ID NO: 3798 - RNA, 23 nt, synthetic construct
  source 1..23: mol_type = other RNA
taatacattggacttactcaact

SEQ ID NO: 3799 - RNA, 23 nt, synthetic construct
  source 1..23: mol_type = other RNA
aatacattggacttactcaactc

SEQ ID NO: 3800 - RNA, 23 nt, synthetic construct
  source 1..23: mol_type = other RNA
atacattggacttactcaactca

SEQ ID NO: 3801 - RNA, 23 nt, synthetic construct
  source 1..23: mol_type = other RNA
tacattggacttactcaactcac

SEQ ID NO: 3802 - RNA, 23 nt, synthetic construct
  source 1..23: mol_type = other RNA
acattggacttactcaactcact

SEQ ID NO: 3803 - RNA, 23 nt, synthetic construct
  source 1..23: mol_type = other RNA
cattggacttactcaactcacta

SEQ ID NO: 3804 - RNA, 23 nt, synthetic construct
  source 1..23: mol_type = other RNA
attggacttactcaactcactat

SEQ ID NO: 3805 - RNA, 23 nt, synthetic construct
  source 1..23: mol_type = other RNA
ttggacttactcaactcactatt

SEQ ID NO: 3806 - RNA, 23 nt, synthetic construct
  source 1..23: mol_type = other RNA
tggacttactcaactcactattt

SEQ ID NO: 3807 - RNA, 23 nt, synthetic construct
  source 1..23: mol_type = other RNA
ggacttactcaactcactatttc

SEQ ID NO: 3808 - RNA, 23 nt, synthetic construct
  source 1..23: mol_type = other RNA
gacttactcaactcactatttct

SEQ ID NO: 3809 - RNA, 23 nt, synthetic construct
  source 1..23: mol_type = other RNA
acttactcaactcactatttctt

SEQ ID NO: 3810 - RNA, 23 nt, synthetic construct
  source 1..23: mol_type = other RNA
cttactcaactcactatttctta

SEQ ID NO: 3811 - RNA, 23 nt, synthetic construct
  source 1..23: mol_type = other RNA
ttactcaactcactatttcttac

SEQ ID NO: 3812 - RNA, 23 nt, synthetic construct
  source 1..23: mol_type = other RNA
tactcaactcactatttcttact

SEQ ID NO: 3813 - RNA, 23 nt, synthetic construct
  source 1..23: mol_type = other RNA
actcaactcactatttcttactt

SEQ ID NO: 3814 - RNA, 23 nt, synthetic construct
  source 1..23: mol_type = other RNA
ctcaactcactatttcttacttt

SEQ ID NO: 3815 - RNA, 23 nt, synthetic construct
  source 1..23: mol_type = other RNA
tcaactcactatttcttactttc

SEQ ID NO: 3816 - RNA, 23 nt, synthetic construct
  source 1..23: mol_type = other RNA
caactcactatttcttactttcg

SEQ ID NO: 3817 - RNA, 23 nt, synthetic construct
  source 1..23: mol_type = other RNA
aactcactatttcttactttcgt

SEQ ID NO: 3818 - RNA, 23 nt, synthetic construct
  source 1..23: mol_type = other RNA
actcactatttcttactttcgtc

SEQ ID NO: 3819 - RNA, 23 nt, synthetic construct
  source 1..23: mol_type = other RNA
ctcactatttcttactttcgtcc

SEQ ID NO: 3820 - RNA, 23 nt, synthetic construct
  source 1..23: mol_type = other RNA
tcactatttcttactttcgtcct

SEQ ID NO: 3821 - RNA, 23 nt, synthetic construct
  source 1..23: mol_type = other RNA
cactatttcttactttcgtcctt

SEQ ID NO: 3822 - RNA, 23 nt, synthetic construct
  source 1..23: mol_type = other RNA
actatttcttactttcgtcctta

SEQ ID NO: 3823 - RNA, 23 nt, synthetic construct
  source 1..23: mol_type = other RNA
ctatttcttactttcgtccttaa

SEQ ID NO: 3824 - RNA, 23 nt, synthetic construct
  source 1..23: mol_type = other RNA
tatttcttactttcgtccttaag

SEQ ID NO: 3825 - RNA, 24 nt, synthetic construct
  source 1..24: mol_type = other RNA
ggagcataaaacatttaataatac

SEQ ID NO: 3826 - RNA, 24 nt, synthetic construct
  source 1..24: mol_type = other RNA
gagcataaaacatttaataataca

SEQ ID NO: 3827 - RNA, 24 nt, synthetic construct
  source 1..24: mol_type = other RNA
agcataaaacatttaataatacat

SEQ ID NO: 3828 - RNA, 24 nt, synthetic construct
  source 1..24: mol_type = other RNA
gcataaaacatttaataatacatt

SEQ ID NO: 3829 - RNA, 24 nt, synthetic construct
  source 1..24: mol_type = other RNA
cataaaacatttaataatacattg

SEQ ID NO: 3830 - RNA, 24 nt, synthetic construct
  source 1..24: mol_type = other RNA
ataaaacatttaataatacattgg

SEQ ID NO: 3831 - RNA, 24 nt, synthetic construct
  source 1..24: mol_type = other RNA
taaaacatttaataatacattgga

SEQ ID NO: 3832 - RNA, 24 nt, synthetic construct
  source 1..24: mol_type = other RNA
aaaacatttaataatacattggac

SEQ ID NO: 3833 - RNA, 24 nt, synthetic construct
  source 1..24: mol_type = other RNA
aaacatttaataatacattggact

SEQ ID NO: 3834 - RNA, 24 nt, synthetic construct
  source 1..24: mol_type = other RNA
aacatttaataatacattggactt

SEQ ID NO: 3835 - RNA, 24 nt, synthetic construct
  source 1..24: mol_type = other RNA
acatttaataatacattggactta

SEQ ID NO: 3836 - RNA, 24 nt, synthetic construct
  source 1..24: mol_type = other RNA
catttaataatacattggacttac

SEQ ID NO: 3837 - RNA, 24 nt, synthetic construct
  source 1..24: mol_type = other RNA
atttaataatacattggacttact

SEQ ID NO: 3838 - RNA, 24 nt, synthetic construct
  source 1..24: mol_type = other RNA
tttaataatacattggacttactc

SEQ ID NO: 3839 - RNA, 24 nt, synthetic construct
  source 1..24: mol_type = other RNA
ttaataatacattggacttactca

SEQ ID NO: 3840 - RNA, 24 nt, synthetic construct
  source 1..24: mol_type = other RNA
taataatacattggacttactcaa

SEQ ID NO: 3841 - RNA, 24 nt, synthetic construct
  source 1..24: mol_type = other RNA
aataatacattggacttactcaac

SEQ ID NO: 3842 - RNA, 24 nt, synthetic construct
  source 1..24: mol_type = other RNA
ataatacattggacttactcaact

SEQ ID NO: 3843 - RNA, 24 nt, synthetic construct
  source 1..24: mol_type = other RNA
taatacattggacttactcaactc

SEQ ID NO: 3844 - RNA, 24 nt, synthetic construct
  source 1..24: mol_type = other RNA
aatacattggacttactcaactca

SEQ ID NO: 3845 - RNA, 24 nt, synthetic construct
  source 1..24: mol_type = other RNA
atacattggacttactcaactcac

SEQ ID NO: 3846 - RNA, 24 nt, synthetic construct
  source 1..24: mol_type = other RNA
tacattggacttactcaactcact

SEQ ID NO: 3847 - RNA, 24 nt, synthetic construct
  source 1..24: mol_type = other RNA
acattggacttactcaactcacta

SEQ ID NO: 3848 - RNA, 24 nt, synthetic construct
  source 1..24: mol_type = other RNA
cattggacttactcaactcactat

SEQ ID NO: 3849 - RNA, 24 nt, synthetic construct
  source 1..24: mol_type = other RNA
attggacttactcaactcactatt

SEQ ID NO: 3850 - RNA, 24 nt, synthetic construct
  source 1..24: mol_type = other RNA
ttggacttactcaactcactattt

SEQ ID NO: 3851 - RNA, 24 nt, synthetic construct
  source 1..24: mol_type = other RNA
tggacttactcaactcactatttc

SEQ ID NO: 3852 - RNA, 24 nt, synthetic construct
  source 1..24: mol_type = other RNA
ggacttactcaactcactatttct

SEQ ID NO: 3853 - RNA, 24 nt, synthetic construct
  source 1..24: mol_type = other RNA
gacttactcaactcactatttctt

SEQ ID NO: 3854 - RNA, 24 nt, synthetic construct
  source 1..24: mol_type = other RNA
acttactcaactcactatttctta

SEQ ID NO: 3855 - RNA, 24 nt, synthetic construct
  source 1..24: mol_type = other RNA
cttactcaactcactatttcttac

SEQ ID NO: 3856 - RNA, 24 nt, synthetic construct
  source 1..24: mol_type = other RNA
ttactcaactcactatttcttact

SEQ ID NO: 3857 - RNA, 24 nt, synthetic construct
  source 1..24: mol_type = other RNA
tactcaactcactatttcttactt

SEQ ID NO: 3858 - RNA, 24 nt, synthetic construct
  source 1..24: mol_type = other RNA
actcaactcactatttcttacttt

SEQ ID NO: 3859 - RNA, 24 nt, synthetic construct
  source 1..24: mol_type = other RNA
ctcaactcactatttcttactttc

SEQ ID NO: 3860 - RNA, 24 nt, synthetic construct
  source 1..24: mol_type = other RNA
tcaactcactatttcttactttcg

SEQ ID NO: 3861 - RNA, 24 nt, synthetic construct
  source 1..24: mol_type = other RNA
caactcactatttcttactttcgt

SEQ ID NO: 3862 - RNA, 24 nt, synthetic construct
  source 1..24: mol_type = other RNA
aactcactatttcttactttcgtc

SEQ ID NO: 3863 - RNA, 24 nt, synthetic construct
  source 1..24: mol_type = other RNA
actcactatttcttactttcgtcc

SEQ ID NO: 3864 - RNA, 24 nt, synthetic construct
  source 1..24: mol_type = other RNA
ctcactatttcttactttcgtcct

SEQ ID NO: 3865 - RNA, 24 nt, synthetic construct
  source 1..24: mol_type = other RNA
tcactatttcttactttcgtcctt

SEQ ID NO: 3866 - RNA, 24 nt, synthetic construct
  source 1..24: mol_type = other RNA
cactatttcttactttcgtcctta

SEQ ID NO: 3867 - RNA, 24 nt, synthetic construct
  source 1..24: mol_type = other RNA
actatttcttactttcgtccttaa

SEQ ID NO: 3868 - RNA, 24 nt, synthetic construct
  source 1..24: mol_type = other RNA
ctatttcttactttcgtccttaag

SEQ ID NO: 3869 - RNA, 25 nt, synthetic construct
  source 1..25: mol_type = other RNA
gggagcataaaacatttaataatac

SEQ ID NO: 3870 - RNA, 25 nt, synthetic construct
  source 1..25: mol_type = other RNA
ggagcataaaacatttaataataca

SEQ ID NO: 3871 - RNA, 25 nt, synthetic construct
  source 1..25: mol_type = other RNA
gagcataaaacatttaataatacat

SEQ ID NO: 3872 - RNA, 25 nt, synthetic construct
  source 1..25: mol_type = other RNA
agcataaaacatttaataatacatt

SEQ ID NO: 3873 - RNA, 25 nt, synthetic construct
  source 1..25: mol_type = other RNA
gcataaaacatttaataatacattg

SEQ ID NO: 3874 - RNA, 25 nt, synthetic construct
  source 1..25: mol_type = other RNA
cataaaacatttaataatacattgg

SEQ ID NO: 3875 - RNA, 25 nt, synthetic construct
  source 1..25: mol_type = other RNA
ataaaacatttaataatacattgga

SEQ ID NO: 3876 - RNA, 25 nt, synthetic construct
  source 1..25: mol_type = other RNA
taaaacatttaataatacattggac

SEQ ID NO: 3877 - RNA, 25 nt, synthetic construct
  source 1..25: mol_type = other RNA
aaaacatttaataatacattggact

SEQ ID NO: 3878 - RNA, 25 nt, synthetic construct
  source 1..25: mol_type = other RNA
aaacatttaataatacattggactt

SEQ ID NO: 3879 - RNA, 25 nt, synthetic construct
  source 1..25: mol_type = other RNA
aacatttaataatacattggactta

SEQ ID NO: 3880 - RNA, 25 nt, synthetic construct
  source 1..25: mol_type = other RNA
acatttaataatacattggacttac

SEQ ID NO: 3881 - RNA, 25 nt, synthetic construct
  source 1..25: mol_type = other RNA
catttaataatacattggacttact

SEQ ID NO: 3882 - RNA, 25 nt, synthetic construct
  source 1..25: mol_type = other RNA
atttaataatacattggacttactc

SEQ ID NO: 3883 - RNA, 25 nt, synthetic construct
  source 1..25: mol_type = other RNA
tttaataatacattggacttactca

SEQ ID NO: 3884 - RNA, 25 nt, synthetic construct
  source 1..25: mol_type = other RNA
ttaataatacattggacttactcaa

SEQ ID NO: 3885 - RNA, 25 nt, synthetic construct
  source 1..25: mol_type = other RNA
taataatacattggacttactcaac

SEQ ID NO: 3886 - RNA, 25 nt, synthetic construct
  source 1..25: mol_type = other RNA
aataatacattggacttactcaact

SEQ ID NO: 3887 - RNA, 25 nt, synthetic construct
  source 1..25: mol_type = other RNA
ataatacattggacttactcaactc

SEQ ID NO: 3888 - RNA, 25 nt, synthetic construct
  source 1..25: mol_type = other RNA
taatacattggacttactcaactca

SEQ ID NO: 3889 - RNA, 25 nt, synthetic construct
  source 1..25: mol_type = other RNA
aatacattggacttactcaactcac

SEQ ID NO: 3890 - RNA, 25 nt, synthetic construct
  source 1..25: mol_type = other RNA
atacattggacttactcaactcact

SEQ ID NO: 3891 - RNA, 25 nt, synthetic construct
  source 1..25: mol_type = other RNA
tacattggacttactcaactcacta

SEQ ID NO: 3892 - RNA, 25 nt, synthetic construct
  source 1..25: mol_type = other RNA
acattggacttactcaactcactat

SEQ ID NO: 3893 - RNA, 25 nt, synthetic construct
  source 1..25: mol_type = other RNA
cattggacttactcaactcactatt

SEQ ID NO: 3894 - RNA, 25 nt, synthetic construct
  source 1..25: mol_type = other RNA
attggacttactcaactcactattt

SEQ ID NO: 3895 - RNA, 25 nt, synthetic construct
  source 1..25: mol_type = other RNA
ttggacttactcaactcactatttc

SEQ ID NO: 3896 - RNA, 25 nt, synthetic construct
  source 1..25: mol_type = other RNA
tggacttactcaactcactatttct

SEQ ID NO: 3897 - RNA, 25 nt, synthetic construct
  source 1..25: mol_type = other RNA
ggacttactcaactcactatttctt

SEQ ID NO: 3898 - RNA, 25 nt, synthetic construct
  source 1..25: mol_type = other RNA
gacttactcaactcactatttctta

SEQ ID NO: 3899 - RNA, 25 nt, synthetic construct
  source 1..25: mol_type = other RNA
acttactcaactcactatttcttac

SEQ ID NO: 3900 - RNA, 25 nt, synthetic construct
  source 1..25: mol_type = other RNA
cttactcaactcactatttcttact

SEQ ID NO: 3901 - RNA, 25 nt, synthetic construct
  source 1..25: mol_type = other RNA
ttactcaactcactatttcttactt

SEQ ID NO: 3902 - RNA, 25 nt, synthetic construct
  source 1..25: mol_type = other RNA
tactcaactcactatttcttacttt

SEQ ID NO: 3903 - RNA, 25 nt, synthetic construct
  source 1..25: mol_type = other RNA
actcaactcactatttcttactttc

SEQ ID NO: 3904 - RNA, 25 nt, synthetic construct
  source 1..25: mol_type = other RNA
ctcaactcactatttcttactttcg

SEQ ID NO: 3905 - RNA, 25 nt, synthetic construct
  source 1..25: mol_type = other RNA
tcaactcactatttcttactttcgt

SEQ ID NO: 3906 - RNA, 25 nt, synthetic construct
  source 1..25: mol_type = other RNA
caactcactatttcttactttcgtc

SEQ ID NO: 3907 - RNA, 25 nt, synthetic construct
  source 1..25: mol_type = other RNA
aactcactatttcttactttcgtcc

SEQ ID NO: 3908 - RNA, 25 nt, synthetic construct
  source 1..25: mol_type = other RNA
actcactatttcttactttcgtcct

SEQ ID NO: 3909 - RNA, 25 nt, synthetic construct
  source 1..25: mol_type = other RNA
ctcactatttcttactttcgtcctt

SEQ ID NO: 3910 - RNA, 25 nt, synthetic construct
  source 1..25: mol_type = other RNA
tcactatttcttactttcgtcctta

SEQ ID NO: 3911 - RNA, 25 nt, synthetic construct
  source 1..25: mol_type = other RNA
cactatttcttactttcgtccttaa

SEQ ID NO: 3912 - RNA, 25 nt, synthetic construct
  source 1..25: mol_type = other RNA
actatttcttactttcgtccttaag

SEQ ID NO: 3913 - RNA, 26 nt, synthetic construct
  source 1..26: mol_type = other RNA
agggagcataaaacatttaataatac

SEQ ID NO: 3914 - RNA, 26 nt, synthetic construct
  source 1..26: mol_type = other RNA
gggagcataaaacatttaataataca

SEQ ID NO: 3915 - RNA, 26 nt, synthetic construct
  source 1..26: mol_type = other RNA
ggagcataaaacatttaataatacat

SEQ ID NO: 3916 - RNA, 26 nt, synthetic construct
  source 1..26: mol_type = other RNA
gagcataaaacatttaataatacatt

SEQ ID NO: 3917 - RNA, 26 nt, synthetic construct
  source 1..26: mol_type = other RNA
agcataaaacatttaataatacattg

SEQ ID NO: 3918 - RNA, 26 nt, synthetic construct
  source 1..26: mol_type = other RNA
gcataaaacatttaataatacattgg

SEQ ID NO: 3919 - RNA, 26 nt, synthetic construct
  source 1..26: mol_type = other RNA
cataaaacatttaataatacattgga

SEQ ID NO: 3920 - RNA, 26 nt, synthetic construct
  source 1..26: mol_type = other RNA
ataaaacatttaataatacattggac

SEQ ID NO: 3921 - RNA, 26 nt, synthetic construct
  source 1..26: mol_type = other RNA
taaaacatttaataatacattggact

SEQ ID NO: 3922 - RNA, 26 nt, synthetic construct
  source 1..26: mol_type = other RNA
aaaacatttaataatacattggactt

SEQ ID NO: 3923 - RNA, 26 nt, synthetic construct
  source 1..26: mol_type = other RNA
aaacatttaataatacattggactta

SEQ ID NO: 3924 - RNA, 26 nt, synthetic construct
  source 1..26: mol_type = other RNA
aacatttaataatacattggacttac

SEQ ID NO: 3925 - RNA, 26 nt, synthetic construct
  source 1..26: mol_type = other RNA
acatttaataatacattggacttact

SEQ ID NO: 3926 - RNA, 26 nt, synthetic construct
  source 1..26: mol_type = other RNA
catttaataatacattggacttactc

SEQ ID NO: 3927 - RNA, 26 nt, synthetic construct
  source 1..26: mol_type = other RNA
atttaataatacattggacttactca

SEQ ID NO: 3928 - RNA, 26 nt, synthetic construct
  source 1..26: mol_type = other RNA
tttaataatacattggacttactcaa

SEQ ID NO: 3929 - RNA, 26 nt, synthetic construct
  source 1..26: mol_type = other RNA
ttaataatacattggacttactcaac

SEQ ID NO: 3930 - RNA, 26 nt, synthetic construct
  source 1..26: mol_type = other RNA
taataatacattggacttactcaact

SEQ ID NO: 3931 - RNA, 26 nt, synthetic construct
  source 1..26: mol_type = other RNA
aataatacattggacttactcaactc

SEQ ID NO: 3932 - RNA, 26 nt, synthetic construct
  source 1..26: mol_type = other RNA
ataatacattggacttactcaactca

SEQ ID NO: 3933 - RNA, 26 nt, synthetic construct
  source 1..26: mol_type = other RNA
taatacattggacttactcaactcac

SEQ ID NO: 3934 - RNA, 26 nt, synthetic construct
  source 1..26: mol_type = other RNA
aatacattggacttactcaactcact

SEQ ID NO: 3935 - RNA, 26 nt, synthetic construct
  source 1..26: mol_type = other RNA
atacattggacttactcaactcacta

SEQ ID NO: 3936 - RNA, 26 nt, synthetic construct
  source 1..26: mol_type = other RNA
tacattggacttactcaactcactat

SEQ ID NO: 3937 - RNA, 26 nt, synthetic construct
  source 1..26: mol_type = other RNA
acattggacttactcaactcactatt

SEQ ID NO: 3938 - RNA, 26 nt, synthetic construct
  source 1..26: mol_type = other RNA
cattggacttactcaactcactattt

SEQ ID NO: 3939 - RNA, 26 nt, synthetic construct
  source 1..26: mol_type = other RNA
attggacttactcaactcactatttc

SEQ ID NO: 3940 - RNA, 26 nt, synthetic construct
  source 1..26: mol_type = other RNA
ttggacttactcaactcactatttct

SEQ ID NO: 3941 - RNA, 26 nt, synthetic construct
  source 1..26: mol_type = other RNA
tggacttactcaactcactatttctt

SEQ ID NO: 3942 - RNA, 26 nt, synthetic construct
  source 1..26: mol_type = other RNA
ggacttactcaactcactatttctta

SEQ ID NO: 3943 - RNA, 26 nt, synthetic construct
  source 1..26: mol_type = other RNA
gacttactcaactcactatttcttac

SEQ ID NO: 3944 - RNA, 26 nt, synthetic construct
  source 1..26: mol_type = other RNA
acttactcaactcactatttcttact

SEQ ID NO: 3945 - RNA, 26 nt, synthetic construct
  source 1..26: mol_type = other RNA
cttactcaactcactatttcttactt

SEQ ID NO: 3946 - RNA, 26 nt, synthetic construct
  source 1..26: mol_type = other RNA
ttactcaactcactatttcttacttt

SEQ ID NO: 3947 - RNA, 26 nt, synthetic construct
  source 1..26: mol_type = other RNA
tactcaactcactatttcttactttc

SEQ ID NO: 3948 - RNA, 26 nt, synthetic construct
  source 1..26: mol_type = other RNA
actcaactcactatttcttactttcg

SEQ ID NO: 3949 - RNA, 26 nt, synthetic construct
  source 1..26: mol_type = other RNA
ctcaactcactatttcttactttcgt

SEQ ID NO: 3950 - RNA, 26 nt, synthetic construct
  source 1..26: mol_type = other RNA
tcaactcactatttcttactttcgtc

SEQ ID NO: 3951 - RNA, 26 nt, synthetic construct
  source 1..26: mol_type = other RNA
caactcactatttcttactttcgtcc

SEQ ID NO: 3952 - RNA, 26 nt, synthetic construct
  source 1..26: mol_type = other RNA
aactcactatttcttactttcgtcct

SEQ ID NO: 3953 - RNA, 26 nt, synthetic construct
  source 1..26: mol_type = other RNA
actcactatttcttactttcgtcctt

SEQ ID NO: 3954 - RNA, 26 nt, synthetic construct
  source 1..26: mol_type = other RNA
ctcactatttcttactttcgtcctta

SEQ ID NO: 3955 - RNA, 26 nt, synthetic construct
  source 1..26: mol_type = other RNA
tcactatttcttactttcgtccttaa

SEQ ID NO: 3956 - RNA, 26 nt, synthetic construct
  source 1..26: mol_type = other RNA
cactatttcttactttcgtccttaag

SEQ ID NO: 3957 - RNA, 20 nt, synthetic construct
  source 1..20: mol_type = other RNA
gaatcacttagttgtactgt

SEQ ID NO: 3958 - RNA, 20 nt, synthetic construct
  source 1..20: mol_type = other RNA
gtcattgaagaatcacttag

SEQ ID NO: 3959 - RNA, 20 nt, synthetic construct
  source 1..20: mol_type = other RNA
gagatgagtcattgaagaat

SEQ ID NO: 3960 - RNA, 20 nt, synthetic construct
  source 1..20: mol_type = other RNA
tgaagatttgagatgagtca

SEQ ID NO: 3961 - RNA, 20 nt, synthetic construct
  source 1..20: mol_type = other RNA
tcggaatgaagatttgagat

SEQ ID NO: 3962 - RNA, 20 nt, synthetic construct
  source 1..20: mol_type = other RNA
gaagtcatcggaatgaagat

SEQ ID NO: 3963 - RNA, 20 nt, synthetic construct
  source 1..20: mol_type = other RNA
cttgagaagtcatcggaatg

SEQ ID NO: 3964 - RNA, 20 nt, synthetic construct
  source 1..20: mol_type = other RNA
gcgaagccttgagaagtcat

SEQ ID NO: 3965 - RNA, 20 nt, synthetic construct
  source 1..20: mol_type = other RNA
actcagcgaagccttgagaa

SEQ ID NO: 3966 - RNA, 20 nt, synthetic construct
  source 1..20: mol_type = other RNA
ggatcactcagcgaagcctt

SEQ ID NO: 3967 - RNA, 20 nt, synthetic construct
  source 1..20: mol_type = other RNA
gtgagggatcactcagcgaa

SEQ ID NO: 3968 - RNA, 20 nt, synthetic construct
  source 1..20: mol_type = other RNA
tttgggtgagggatcactca

SEQ ID NO: 3969 - RNA, 20 nt, synthetic construct
  source 1..20: mol_type = other RNA
aatcatttgggtgagggatc

SEQ ID NO: 3970 - RNA, 20 nt, synthetic construct
  source 1..20: mol_type = other RNA
agtcaataatcatttgggtg

SEQ ID NO: 3971 - RNA, 20 nt, synthetic construct
  source 1..20: mol_type = other RNA
ggagagggaagtcaataatc

SEQ ID NO: 3972 - RNA, 20 nt, synthetic construct
  source 1..20: mol_type = other RNA
tgagggaggagagggaagtc

SEQ ID NO: 3973 - RNA, 20 nt, synthetic construct
  source 1..20: mol_type = other RNA
aaatctggggtgagggagga

SEQ ID NO: 3974 - RNA, 20 nt, synthetic construct
  source 1..20: mol_type = other RNA
catgagaaatctggggtgag

SEQ ID NO: 3975 - RNA, 20 nt, synthetic construct
  source 1..20: mol_type = other RNA
gcagtgacacatgagaaatc

SEQ ID NO: 3976 - RNA, 20 nt, synthetic construct
  source 1..20: mol_type = other RNA
aattggcagtgacacatgag

SEQ ID NO: 3977 - RNA, 20 nt, synthetic construct
  source 1..20: mol_type = other RNA
atttgaattggcagtgacac

SEQ ID NO: 3978 - RNA, 20 nt, synthetic construct
  source 1..20: mol_type = other RNA
agccatgaatttgaattggc

SEQ ID NO: 3979 - RNA, 20 nt, synthetic construct
  source 1..20: mol_type = other RNA
gtgctttagccatgaatttg

SEQ ID NO: 3980 - RNA, 20 nt, synthetic construct
  source 1..20: mol_type = other RNA
aagagattagtgctttagcc

SEQ ID NO: 3981 - RNA, 20 nt, synthetic construct
  source 1..20: mol_type = other RNA
gtgtggaaagagattagtgc

SEQ ID NO: 3982 - RNA, 20 nt, synthetic construct
  source 1..20: mol_type = other RNA
ttccaggaagtagaggtgtg

SEQ ID NO: 3983 - RNA, 20 nt, synthetic construct
  source 1..20: mol_type = other RNA
agaaaggattccaggaagta

SEQ ID NO: 3984 - RNA, 20 nt, synthetic construct
  source 1..20: mol_type = other RNA
taacaagaaaggattccagg

SEQ ID NO: 3985 - RNA, 20 nt, synthetic construct
  source 1..20: mol_type = other RNA
gactgataacaagaaaggat

SEQ ID NO: 3986 - RNA, 20 nt, synthetic construct
  source 1..20: mol_type = other RNA
gatataagactgataacaag

SEQ ID NO: 3987 - RNA, 20 nt, synthetic construct
  source 1..20: mol_type = other RNA
ggcatagatataagactgat

SEQ ID NO: 3988 - RNA, 20 nt, synthetic construct
  source 1..20: mol_type = other RNA
gaattgggcatagatataag

SEQ ID NO: 3989 - RNA, 20 nt, synthetic construct
  source 1..20: mol_type = other RNA
gctggctgaattgggcatag

SEQ ID NO: 3990 - RNA, 20 nt, synthetic construct
  source 1..20: mol_type = other RNA
cccaatggctggctgaattg

SEQ ID NO: 3991 - RNA, 20 nt, synthetic construct
  source 1..20: mol_type = other RNA
cattaccccaatggctggct

SEQ ID NO: 3992 - RNA, 20 nt, synthetic construct
  source 1..20: mol_type = other RNA
gaaagttcattaccccaatg

SEQ ID NO: 3993 - RNA, 20 nt, synthetic construct
  source 1..20: mol_type = other RNA
gaatggaaagttcattaccc

SEQ ID NO: 3994 - RNA, 20 nt, synthetic construct
  source 1..20: mol_type = other RNA
gttctagaatggaaagttca

SEQ ID NO: 3995 - RNA, 20 nt, synthetic construct
  source 1..20: mol_type = other RNA
ggactgtggttctagaatgg

SEQ ID NO: 3996 - RNA, 20 nt, synthetic construct
  source 1..20: mol_type = other RNA
ggcaaattggactgtggttc

SEQ ID NO: 3997 - RNA, 20 nt, synthetic construct
  source 1..20: mol_type = other RNA
ggtaacaggcaaattggact

SEQ ID NO: 3998 - RNA, 20 nt, synthetic construct
  source 1..20: mol_type = other RNA
agtgaggtaacaggcaaatt

SEQ ID NO: 3999 - RNA, 20 nt, synthetic construct
  source 1..20: mol_type = other RNA
ttctcagtgaggtaacaggc

SEQ ID NO: 4000 - RNA, 20 nt, synthetic construct
  source 1..20: mol_type = other RNA
agagccttctcagtgaggta

SEQ ID NO: 4001 - RNA, 20 nt, synthetic construct
  source 1..20: mol_type = other RNA
gccccagagccttctcagtg

SEQ ID NO: 4002 - RNA, 20 nt, synthetic construct
  source 1..20: mol_type = other RNA
tgtcagagccccagagcctt

SEQ ID NO: 4003 - RNA, 20 nt, synthetic construct
  source 1..20: mol_type = other RNA
gtgtttgtcagagccccaga

SEQ ID NO: 4004 - RNA, 20 nt, synthetic construct
  source 1..20: mol_type = other RNA
cagcagtgtttgtcagagcc

SEQ ID NO: 4005 - RNA, 20 nt, synthetic construct
  source 1..20: mol_type = other RNA
aactcacagcagtgtttgtc

SEQ ID NO: 4006 - RNA, 20 nt, synthetic construct
  source 1..20: mol_type = other RNA
ttcaggaaactcacagcagt

SEQ ID NO: 4007 - RNA, 20 nt, synthetic construct
  source 1..20: mol_type = other RNA
aagtaggtttcaggaaactc

SEQ ID NO: 4008 - RNA, 20 nt, synthetic construct
  source 1..20: mol_type = other RNA
ggtactcctgagcctgaaat

SEQ ID NO: 4009 - RNA, 20 nt, synthetic construct
  source 1..20: mol_type = other RNA
attgagttactaggcttagt

SEQ ID NO: 4010 - RNA, 20 nt, synthetic construct
  source 1..20: mol_type = other RNA
taactattgagttactaggc

SEQ ID NO: 4011 - RNA, 20 nt, synthetic construct
  source 1..20: mol_type = other RNA
aaaattaactattgagttac

SEQ ID NO: 4012 - RNA, 20 nt, synthetic construct
  source 1..20: mol_type = other RNA
tgggggcccattggagggtg

SEQ ID NO: 4013 - RNA, 20 nt, synthetic construct
  source 1..20: mol_type = other RNA
gacactgggggcccattgga

SEQ ID NO: 4014 - RNA, 20 nt, synthetic construct
  source 1..20: mol_type = other RNA
ccagtaagtgtgaactaaat

SEQ ID NO: 4015 - RNA, 20 nt, synthetic construct
  source 1..20: mol_type = other RNA
gaggtttccagtaagtgtga

SEQ ID NO: 4016 - RNA, 20 nt, synthetic construct
  source 1..20: mol_type = other RNA
gccaaaggaggtttccagta

SEQ ID NO: 4017 - RNA, 20 nt, synthetic construct
  source 1..20: mol_type = other RNA
atgtggccaaaggaggtttc

SEQ ID NO: 4018 - RNA, 20 nt, synthetic construct
  source 1..20: mol_type = other RNA
tgtcaaaatgtggccaaagg

SEQ ID NO: 4019 - RNA, 20 nt, synthetic construct
  source 1..20: mol_type = other RNA
catagtgtcaaaatgtggcc

SEQ ID NO: 4020 - RNA, 20 nt, synthetic construct
  source 1..20: mol_type = other RNA
cctgacatagtgtcaaaatg

SEQ ID NO: 4021 - RNA, 20 nt, synthetic construct
  source 1..20: mol_type = other RNA
caacctctcctgacatagtg

SEQ ID NO: 4022 - RNA, 20 nt, synthetic construct
  source 1..20: mol_type = other RNA
aggatccaacctctcctgac

SEQ ID NO: 4023 - RNA, 20 nt, synthetic construct
  source 1..20: mol_type = other RNA
gttggaggatccaacctctc

SEQ ID NO: 4024 - RNA, 20 nt, synthetic construct
  source 1..20: mol_type = other RNA
tcggcaggggttggaggatc

SEQ ID NO: 4025 - RNA, 20 nt, synthetic construct
  source 1..20: mol_type = other RNA
tgatctcggcaggggttgga

SEQ ID NO: 4026 - RNA, 20 nt, synthetic construct
  source 1..20: mol_type = other RNA
tgcagtgatctcggcagggg

SEQ ID NO: 4027 - RNA, 20 nt, synthetic construct
  source 1..20: mol_type = other RNA
gtatctgcagtgatctcggc

SEQ ID NO: 4028 - RNA, 20 nt, synthetic construct
  source 1..20: mol_type = other RNA
tctaagtatctgcagtgatc

SEQ ID NO: 4029 - RNA, 20 nt, synthetic construct
  source 1..20: mol_type = other RNA
atccaggctctaagtatctg

SEQ ID NO: 4030 - RNA, 20 nt, synthetic construct
  source 1..20: mol_type = other RNA
atcttatccaggctctaagt

SEQ ID NO: 4031 - RNA, 20 nt, synthetic construct
  source 1..20: mol_type = other RNA
gttgatcatcttatccaggc

SEQ ID NO: 4032 - RNA, 20 nt, synthetic construct
  source 1..20: mol_type = other RNA
aagcactgttgatcatctta

SEQ ID NO: 4033 - RNA, 20 nt, synthetic construct
  source 1..20: mol_type = other RNA
agctatttaaagcactgttg

SEQ ID NO: 4034 - RNA, 20 nt, synthetic construct
  source 1..20: mol_type = other RNA
atataagctatttaaagcac

SEQ ID NO: 4035 - RNA, 20 nt, synthetic construct
  source 1..20: mol_type = other RNA
tcagcacagctttttaaaat

SEQ ID NO: 4036 - RNA, 20 nt, synthetic construct
  source 1..20: mol_type = other RNA
gcaaaacattcagcacagct

SEQ ID NO: 4037 - RNA, 20 nt, synthetic construct
  source 1..20: mol_type = other RNA
cagtggcctgcaaaacattc

SEQ ID NO: 4038 - RNA, 20 nt, synthetic construct
  source 1..20: mol_type = other RNA
cacctcagtggcctgcaaaa

SEQ ID NO: 4039 - RNA, 20 nt, synthetic construct
  source 1..20: mol_type = other RNA
gtccgcacctcagtggcctg

SEQ ID NO: 4040 - RNA, 20 nt, synthetic construct
  source 1..20: mol_type = other RNA
accatgtccgcacctcagtg

SEQ ID NO: 4041 - RNA, 20 nt, synthetic construct
  source 1..20: mol_type = other RNA
tataaaaccatgtccgcacc

SEQ ID NO: 4042 - RNA, 20 nt, synthetic construct
  source 1..20: mol_type = other RNA
actgatataaaaccatgtcc

SEQ ID NO: 4043 - RNA, 20 nt, synthetic construct
  source 1..20: mol_type = other RNA
cacctgtgatctcactgata

SEQ ID NO: 4044 - RNA, 20 nt, synthetic construct
  source 1..20: mol_type = other RNA
accttgctcacctgtgatct

SEQ ID NO: 4045 - RNA, 20 nt, synthetic construct
  source 1..20: mol_type = other RNA
caataacaccttgctcacct

SEQ ID NO: 4046 - RNA, 20 nt, synthetic construct
  source 1..20: mol_type = other RNA
tatagccaataacaccttgc

SEQ ID NO: 4047 - RNA, 20 nt, synthetic construct
  source 1..20: mol_type = other RNA
caaacattatagccaataac

SEQ ID NO: 4048 - RNA, 20 nt, synthetic construct
  source 1..20: mol_type = other RNA
aggctgattttcaaacatta

SEQ ID NO: 4049 - RNA, 20 nt, synthetic construct
  source 1..20: mol_type = other RNA
tgttaaaggctgattttcaa

SEQ ID NO: 4050 - RNA, 20 nt, synthetic construct
  source 1..20: mol_type = other RNA
tcagatgttaaaggctgatt

SEQ ID NO: 4051 - RNA, 20 nt, synthetic construct
  source 1..20: mol_type = other RNA
tataatcagatgttaaaggc

SEQ ID NO: 4052 - RNA, 20 nt, synthetic construct
  source 1..20: mol_type = other RNA
ataagaagtcaaatataatc

SEQ ID NO: 4053 - RNA, 20 nt, synthetic construct
  source 1..20: mol_type = other RNA
ggacactcaaataagaagtc

SEQ ID NO: 4054 - RNA, 20 nt, synthetic construct
  source 1..20: mol_type = other RNA
tccaaggacactcaaataag

SEQ ID NO: 4055 - RNA, 20 nt, synthetic construct
  source 1..20: mol_type = other RNA
acatggtccaaggacactca

SEQ ID NO: 4056 - RNA, 20 nt, synthetic construct
  source 1..20: mol_type = other RNA
tagaaaatttatacattatc

SEQ ID NO: 4057 - RNA, 20 nt, synthetic construct
  source 1..20: mol_type = other RNA
gaagttatagaaaatttata

SEQ ID NO: 4058 - RNA, 20 nt, synthetic construct
  source 1..20: mol_type = other RNA
ttatgcatgaagaagttata

SEQ ID NO: 4059 - RNA, 20 nt, synthetic construct
  source 1..20: mol_type = other RNA
ggattttatgcatgaagaag

SEQ ID NO: 4060 - RNA, 20 nt, synthetic construct
  source 1..20: mol_type = other RNA
atgttaataggattttatgc

SEQ ID NO: 4061 - RNA, 20 nt, synthetic construct
  source 1..20: mol_type = other RNA
tcagcaatgttaataggatt

SEQ ID NO: 4062 - RNA, 20 nt, synthetic construct
  source 1..20: mol_type = other RNA
ggtttgtgttcacttactag

SEQ ID NO: 4063 - RNA, 20 nt, synthetic construct
  source 1..20: mol_type = other RNA
tcacaaaggtttgtgttcac

SEQ ID NO: 4064 - RNA, 20 nt, synthetic construct
  source 1..20: mol_type = other RNA
tgaaatcacaaaggtttgtg

SEQ ID NO: 4065 - RNA, 20 nt, synthetic construct
  source 1..20: mol_type = other RNA
gatggtctttgaaatcacaa

SEQ ID NO: 4066 - RNA, 20 nt, synthetic construct
  source 1..20: mol_type = other RNA
atctcaagagatggtctttg

SEQ ID NO: 4067 - RNA, 20 nt, synthetic construct
  source 1..20: mol_type = other RNA
ttaaccaatctcaagagatg

SEQ ID NO: 4068 - RNA, 20 nt, synthetic construct
  source 1..20: mol_type = other RNA
gttaaaagttaaccaatctc

SEQ ID NO: 4069 - RNA, 20 nt, synthetic construct
  source 1..20: mol_type = other RNA
ggtttagttaaaagttaacc

SEQ ID NO: 4070 - RNA, 20 nt, synthetic construct
  source 1..20: mol_type = other RNA
tgggaggtttagttaaaagt

SEQ ID NO: 4071 - RNA, 20 nt, synthetic construct
  source 1..20: mol_type = other RNA
ctgtgtgtctgggaggttta

SEQ ID NO: 4072 - RNA, 20 nt, synthetic construct
  source 1..20: mol_type = other RNA
tcaggctgtgtgtctgggag

SEQ ID NO: 4073 - RNA, 20 nt, synthetic construct
  source 1..20: mol_type = other RNA
taaggtcaggctgtgtgtct

SEQ ID NO: 4074 - RNA, 20 nt, synthetic construct
  source 1..20: mol_type = other RNA
attggaagataaggtcaggc

SEQ ID NO: 4075 - RNA, 20 nt, synthetic construct
  source 1..20: mol_type = other RNA
tgcaagaaagattggaagat

SEQ ID NO: 4076 - RNA, 20 nt, synthetic construct
  source 1..20: mol_type = other RNA
cctaactgcaagaaagattg

SEQ ID NO: 4077 - RNA, 20 nt, synthetic construct
  source 1..20: mol_type = other RNA
acataaccacacctaactgc

SEQ ID NO: 4078 - RNA, 20 nt, synthetic construct
  source 1..20: mol_type = other RNA
gtgccacataaccacaccta

SEQ ID NO: 4079 - RNA, 20 nt, synthetic construct
  source 1..20: mol_type = other RNA
tccactggagaggactgtgc

SEQ ID NO: 4080 - RNA, 20 nt, synthetic construct
  source 1..20: mol_type = other RNA
cagattccactggagaggac

SEQ ID NO: 4081 - RNA, 20 nt, synthetic construct
  source 1..20: mol_type = other RNA
tacttctactcagattccac

SEQ ID NO: 4082 - RNA, 20 nt, synthetic construct
  source 1..20: mol_type = other RNA
gtggcatccattacttctac

SEQ ID NO: 4083 - RNA, 20 nt, synthetic construct
  source 1..20: mol_type = other RNA
cctggaagtggcatccatta

SEQ ID NO: 4084 - RNA, 20 nt, synthetic construct
  source 1..20: mol_type = other RNA
tgtgggccaatcctggaagt

SEQ ID NO: 4085 - RNA, 20 nt, synthetic construct
  source 1..20: mol_type = other RNA
gaaagttcctgtgggccaat

SEQ ID NO: 4086 - RNA, 20 nt, synthetic construct
  source 1..20: mol_type = other RNA
ttgtatggaaagttcctgtg

SEQ ID NO: 4087 - RNA, 20 nt, synthetic construct
  source 1..20: mol_type = other RNA
ggagcattttgtatggaaag

SEQ ID NO: 4088 - RNA, 20 nt, synthetic construct
  source 1..20: mol_type = other RNA
gaaaatatggagcattttgt

SEQ ID NO: 4089 - RNA, 20 nt, synthetic construct
  source 1..20: mol_type = other RNA
gaagagaaaatatggagcat

SEQ ID NO: 4090 - RNA, 20 nt, synthetic construct
  source 1..20: mol_type = other RNA
tcacacagggaagagaaaat

SEQ ID NO: 4091 - RNA, 20 nt, synthetic construct
  source 1..20: mol_type = other RNA
atccatcacacagggaagag

SEQ ID NO: 4092 - RNA, 20 nt, synthetic construct
  source 1..20: mol_type = other RNA
catgtatccatcacacaggg

SEQ ID NO: 4093 - RNA, 20 nt, synthetic construct
  source 1..20: mol_type = other RNA
catggacatgtatccatcac

SEQ ID NO: 4094 - RNA, 20 nt, synthetic construct
  source 1..20: mol_type = other RNA
cttggacatggacatgtatc

SEQ ID NO: 4095 - RNA, 20 nt, synthetic construct
  source 1..20: mol_type = other RNA
ggtctccttggacatggaca

SEQ ID NO: 4096 - RNA, 20 nt, synthetic construct
  source 1..20: mol_type = other RNA
ggcttttaaggtctccttgg

SEQ ID NO: 4097 - RNA, 20 nt, synthetic construct
  source 1..20: mol_type = other RNA
catgtggcttttaaggtctc

SEQ ID NO: 4098 - RNA, 20 nt, synthetic construct
  source 1..20: mol_type = other RNA
cctcaacatgtggcttttaa

SEQ ID NO: 4099 - RNA, 20 nt, synthetic construct
  source 1..20: mol_type = other RNA
gaagctctaccatcctcaac

SEQ ID NO: 4100 - RNA, 20 nt, synthetic construct
  source 1..20: mol_type = other RNA
aggctgacagaagctctacc

SEQ ID NO: 4101 - RNA, 20 nt, synthetic construct
  source 1..20: mol_type = other RNA
agagacccaggctgacagaa

SEQ ID NO: 4102 - RNA, 20 nt, synthetic construct
  source 1..20: mol_type = other RNA
gcaaaggtgctctgctccat

SEQ ID NO: 4103 - RNA, 20 nt, synthetic construct
  source 1..20: mol_type = other RNA
gttgggcaaaggtgctctgc

SEQ ID NO: 4104 - RNA, 20 nt, synthetic construct
  source 1..20: mol_type = other RNA
tcggtgttgggcaaaggtgc

SEQ ID NO: 4105 - RNA, 20 nt, synthetic construct
  source 1..20: mol_type = other RNA
ggaaatcggtgttgggcaaa

SEQ ID NO: 4106 - RNA, 20 nt, synthetic construct
  source 1..20: mol_type = other RNA
taaggggaaatcggtgttgg

SEQ ID NO: 4107 - RNA, 20 nt, synthetic construct
  source 1..20: mol_type = other RNA
cttgaataaggggaaatcgg

SEQ ID NO: 4108 - RNA, 20 nt, synthetic construct
  source 1..20: mol_type = other RNA
gtaggccttgaataagggga

SEQ ID NO: 4109 - RNA, 20 nt, synthetic construct
  source 1..20: mol_type = other RNA
agtccagtaggccttgaata

SEQ ID NO: 4110 - RNA, 20 nt, synthetic construct
  source 1..20: mol_type = other RNA
atgtgaagtccagtaggcct

SEQ ID NO: 4111 - RNA, 20 nt, synthetic construct
  source 1..20: mol_type = other RNA
atttcccctcatgtgaagtc

SEQ ID NO: 4112 - RNA, 20 nt, synthetic construct
  source 1..20: mol_type = other RNA
gctaattatttcccctcatg

SEQ ID NO: 4113 - RNA, 20 nt, synthetic construct
  source 1..20: mol_type = other RNA
gtgatacttgctaattattt

SEQ ID NO: 4114 - RNA, 20 nt, synthetic construct
  source 1..20: mol_type = other RNA
ttaaggtagtgatacttgct

SEQ ID NO: 4115 - RNA, 20 nt, synthetic construct
  source 1..20: mol_type = other RNA
tttggttaaggtagtgatac

SEQ ID NO: 4116 - RNA, 20 nt, synthetic construct
  source 1..20: mol_type = other RNA
gatgatttggttaaggtagt

SEQ ID NO: 4117 - RNA, 20 nt, synthetic construct
  source 1..20: mol_type = other RNA
cttacttgttggatgatttg

SEQ ID NO: 4118 - RNA, 20 nt, synthetic construct
  source 1..20: mol_type = other RNA
ttgccacttacttgttggat

SEQ ID NO: 4119 - RNA, 20 nt, synthetic construct
  source 1..20: mol_type = other RNA
ctttagatcctggttttgcc

SEQ ID NO: 4120 - RNA, 20 nt, synthetic construct
  source 1..20: mol_type = other RNA
actggctttagatcctggtt

SEQ ID NO: 4121 - RNA, 20 nt, synthetic construct
  source 1..20: mol_type = other RNA
caaagaactggctttagatc

SEQ ID NO: 4122 - RNA, 20 nt, synthetic construct
  source 1..20: mol_type = other RNA
tgaagtcacaaagaactggc

SEQ ID NO: 4123 - RNA, 20 nt, synthetic construct
  source 1..20: mol_type = other RNA
gcacaggcttgtgaagtcac

SEQ ID NO: 4124 - RNA, 20 nt, synthetic construct
  source 1..20: mol_type = other RNA
gaaaagagcacaggcttgtg

SEQ ID NO: 4125 - RNA, 20 nt, synthetic construct
  source 1..20: mol_type = other RNA
aatggtatagtgaaaagagc

SEQ ID NO: 4126 - RNA, 20 nt, synthetic construct
  source 1..20: mol_type = other RNA
gggaggcagaatggtatagt

SEQ ID NO: 4127 - RNA, 20 nt, synthetic construct
  source 1..20: mol_type = other RNA
gcagagggaggcagaatggt

SEQ ID NO: 4128 - RNA, 20 nt, synthetic construct
  source 1..20: mol_type = other RNA
ttgactgcagagggaggcag

SEQ ID NO: 4129 - RNA, 20 nt, synthetic construct
  source 1..20: mol_type = other RNA
caatttctgtagtttagttg

SEQ ID NO: 4130 - RNA, 20 nt, synthetic construct
  source 1..20: mol_type = other RNA
ctgtgtggaaggacacaatt

SEQ ID NO: 4131 - RNA, 20 nt, synthetic construct
  source 1..20: mol_type = other RNA
tttttaaagcaagctgtgtg

SEQ ID NO: 4132 - RNA, 20 nt, synthetic construct
  source 1..20: mol_type = other RNA
gcttatgtatttttaaagca

SEQ ID NO: 4133 - RNA, 20 nt, synthetic construct
  source 1..20: mol_type = other RNA
tcttaggtagcttatgtatt

SEQ ID NO: 4134 - RNA, 20 nt, synthetic construct
  source 1..20: mol_type = other RNA
ttagagctttcttaggtagc

SEQ ID NO: 4135 - RNA, 20 nt, synthetic construct
  source 1..20: mol_type = other RNA
gtctaaattagagctttctt

SEQ ID NO: 4136 - RNA, 20 nt, synthetic construct
  source 1..20: mol_type = other RNA
aaaatgtctaaattagagct

SEQ ID NO: 4137 - RNA, 20 nt, synthetic construct
  source 1..20: mol_type = other RNA
ctagcagagagaaaaatgtc

SEQ ID NO: 4138 - RNA, 20 nt, synthetic construct
  source 1..20: mol_type = other RNA
tagagactagcagagagaaa

SEQ ID NO: 4139 - RNA, 20 nt, synthetic construct
  source 1..20: mol_type = other RNA
tggcatagagactagcagag

SEQ ID NO: 4140 - RNA, 20 nt, synthetic construct
  source 1..20: mol_type = other RNA
gtttttttgtggcatagaga

SEQ ID NO: 4141 - RNA, 20 nt, synthetic construct
  source 1..20: mol_type = other RNA
ggctatgtttttttgtggca

SEQ ID NO: 4142 - RNA, 20 nt, synthetic construct
  source 1..20: mol_type = other RNA
taattggctatgtttttttg

SEQ ID NO: 4143 - RNA, 20 nt, synthetic construct
  source 1..20: mol_type = other RNA
caatataattggctatgttt

SEQ ID NO: 4144 - RNA, 20 nt, synthetic construct
  source 1..20: mol_type = other RNA
gttaacacaatataattggc

SEQ ID NO: 4145 - RNA, 20 nt, synthetic construct
  source 1..20: mol_type = other RNA
gagtcagttaacacaatata

SEQ ID NO: 4146 - RNA, 20 nt, synthetic construct
  source 1..20: mol_type = other RNA
gccagcatgagtcagttaac

SEQ ID NO: 4147 - RNA, 20 nt, synthetic construct
  source 1..20: mol_type = other RNA
ataaattgtgtaaagccagc

SEQ ID NO: 4148 - RNA, 20 nt, synthetic construct
  source 1..20: mol_type = other RNA
tgaaaatcaatataaattgt

SEQ ID NO: 4149 - RNA, 20 nt, synthetic construct
  source 1..20: mol_type = other RNA
ccaccctgaaaatcaatata

SEQ ID NO: 4150 - RNA, 20 nt, synthetic construct
  source 1..20: mol_type = other RNA
gctggttattaccaccctga

SEQ ID NO: 4151 - RNA, 20 nt, synthetic construct
  source 1..20: mol_type = other RNA
cacagaagctggttattacc

SEQ ID NO: 4152 - RNA, 20 nt, synthetic construct
  source 1..20: mol_type = other RNA
ccaatcacagaagctggtta

SEQ ID NO: 4153 - RNA, 20 nt, synthetic construct
  source 1..20: mol_type = other RNA
tgcacatgcacaccaatcac

SEQ ID NO: 4154 - RNA, 20 nt, synthetic construct
  source 1..20: mol_type = other RNA
caggaagtcttgcacatgca

SEQ ID NO: 4155 - RNA, 20 nt, synthetic construct
  source 1..20: mol_type = other RNA
ggttaggcaggaagtcttgc

SEQ ID NO: 4156 - RNA, 20 nt, synthetic construct
  source 1..20: mol_type = other RNA
acaagaaggatgggttaggc

SEQ ID NO: 4157 - RNA, 20 nt, synthetic construct
  source 1..20: mol_type = other RNA
agctgagccacaagaaggat

SEQ ID NO: 4158 - RNA, 20 nt, synthetic construct
  source 1..20: mol_type = other RNA
tacaaagctgagccacaaga

SEQ ID NO: 4159 - RNA, 20 nt, synthetic construct
  source 1..20: mol_type = other RNA
agtgtttacaaagctgagcc

SEQ ID NO: 4160 - RNA, 20 nt, synthetic construct
  source 1..20: mol_type = other RNA
gggccagtgtttacaaagct

SEQ ID NO: 4161 - RNA, 20 nt, synthetic construct
  source 1..20: mol_type = other RNA
cacccagggccagtgtttac

SEQ ID NO: 4162 - RNA, 20 nt, synthetic construct
  source 1..20: mol_type = other RNA
tcacggccacccagggccag

SEQ ID NO: 4163 - RNA, 20 nt, synthetic construct
  source 1..20: mol_type = other RNA
tctgttcacggccacccagg

SEQ ID NO: 4164 - RNA, 20 nt, synthetic construct
  source 1..20: mol_type = other RNA
taagaacttctgttcacggc

SEQ ID NO: 4165 - RNA, 20 nt, synthetic construct
  source 1..20: mol_type = other RNA
ctaagataagaacttctgtt

SEQ ID NO: 4166 - RNA, 20 nt, synthetic construct
  source 1..20: mol_type = other RNA
tgcagtctaagataagaact

SEQ ID NO: 4167 - RNA, 20 nt, synthetic construct
  source 1..20: mol_type = other RNA
gttgcatgcagtctaagata

SEQ ID NO: 4168 - RNA, 20 nt, synthetic construct
  source 1..20: mol_type = other RNA
gatgagttgcatgcagtcta

SEQ ID NO: 4169 - RNA, 20 nt, synthetic construct
  source 1..20: mol_type = other RNA
cagtaggatgagttgcatgc

SEQ ID NO: 4170 - RNA, 20 nt, synthetic construct
  source 1..20: mol_type = other RNA
gctttcagtgccagtaggat

SEQ ID NO: 4171 - RNA, 20 nt, synthetic construct
  source 1..20: mol_type = other RNA
gaagggctttcagtgccagt

SEQ ID NO: 4172 - RNA, 20 nt, synthetic construct
  source 1..20: mol_type = other RNA
acaaagaagggctttcagtg

SEQ ID NO: 4173 - RNA, 20 nt, synthetic construct
  source 1..20: mol_type = other RNA
gtaggtgaagaaagacaaag

SEQ ID NO: 4174 - RNA, 20 nt, synthetic construct
  source 1..20: mol_type = other RNA
ttgcttaagtaggtgaagaa

SEQ ID NO: 4175 - RNA, 20 nt, synthetic construct
  source 1..20: mol_type = other RNA
gtaaatttgcttaagtaggt

SEQ ID NO: 4176 - RNA, 20 nt, synthetic construct
  source 1..20: mol_type = other RNA
aaagtggcttgtaaatttgc

SEQ ID NO: 4177 - RNA, 20 nt, synthetic construct
  source 1..20: mol_type = other RNA
ggcaaaaagtggcttgtaaa

SEQ ID NO: 4178 - RNA, 20 nt, synthetic construct
  source 1..20: mol_type = other RNA
gaagaggcaaaaagtggctt

SEQ ID NO: 4179 - RNA, 20 nt, synthetic construct
  source 1..20: mol_type = other RNA
tgagagaagaggcaaaaagt

SEQ ID NO: 4180 - RNA, 20 nt, synthetic construct
  source 1..20: mol_type = other RNA
ggctgctgagagaagaggca

SEQ ID NO: 4181 - RNA, 20 nt, synthetic construct
  source 1..20: mol_type = other RNA
aagatggctgctgagagaag

SEQ ID NO: 4182 - RNA, 20 nt, synthetic construct
  source 1..20: mol_type = other RNA
aaggaccaagatggctgctg

SEQ ID NO: 4183 - RNA, 20 nt, synthetic construct
  source 1..20: mol_type = other RNA
attgaaaggaccaagatggc

SEQ ID NO: 4184 - RNA, 20 nt, synthetic construct
  source 1..20: mol_type = other RNA
caggcaacattgaaaggacc

SEQ ID NO: 4185 - RNA, 20 nt, synthetic construct
  source 1..20: mol_type = other RNA
gtgcacacaggcaacattga

SEQ ID NO: 4186 - RNA, 20 nt, synthetic construct
  source 1..20: mol_type = other RNA
tacagcatgagtgcacacag

SEQ ID NO: 4187 - RNA, 20 nt, synthetic construct
  source 1..20: mol_type = other RNA
ataaatacagcatgagtgca

SEQ ID NO: 4188 - RNA, 20 nt, synthetic construct
  source 1..20: mol_type = other RNA
aggtcataaatacagcatga

SEQ ID NO: 4189 - RNA, 20 nt, synthetic construct
  source 1..20: mol_type = other RNA
gagggaccaggtcataaata

SEQ ID NO: 4190 - RNA, 20 nt, synthetic construct
  source 1..20: mol_type = other RNA
tatgagagggaccaggtcat

SEQ ID NO: 4191 - RNA, 20 nt, synthetic construct
  source 1..20: mol_type = other RNA
ctcaaagtatgagagggacc

SEQ ID NO: 4192 - RNA, 20 nt, synthetic construct
  source 1..20: mol_type = other RNA
gttatatctcaaagtatgag

SEQ ID NO: 4193 - RNA, 20 nt, synthetic construct
  source 1..20: mol_type = other RNA
cttgagttatatctcaaagt

SEQ ID NO: 4194 - RNA, 20 nt, synthetic construct
  source 1..20: mol_type = other RNA
agaaggaaggacttgagtta

SEQ ID NO: 4195 - RNA, 20 nt, synthetic construct
  source 1..20: mol_type = other RNA
ttctcaaagaaggaaggact

SEQ ID NO: 4196 - RNA, 20 nt, synthetic construct
  source 1..20: mol_type = other RNA
gtatggattctcaaagaagg

SEQ ID NO: 4197 - RNA, 20 nt, synthetic construct
  source 1..20: mol_type = other RNA
ccatcagtatggattctcaa

SEQ ID NO: 4198 - RNA, 20 nt, synthetic construct
  source 1..20: mol_type = other RNA
gtgacccatcagtatggatt

SEQ ID NO: 4199 - RNA, 20 nt, synthetic construct
  source 1..20: mol_type = other RNA
gtatttaaaaagtgacccat

SEQ ID NO: 4200 - RNA, 20 nt, synthetic construct
  source 1..20: mol_type = other RNA
gaccttaagtatttaaaaag

SEQ ID NO: 4201 - RNA, 20 nt, synthetic construct
  source 1..20: mol_type = other RNA
tgatgcagaccttaagtatt

SEQ ID NO: 4202 - RNA, 20 nt, synthetic construct
  source 1..20: mol_type = other RNA
tataatgtttgatgcagacc

SEQ ID NO: 4203 - RNA, 20 nt, synthetic construct
  source 1..20: mol_type = other RNA
aatgttataatgtttgatgc

SEQ ID NO: 4204 - RNA, 20 nt, synthetic construct
  source 1..20: mol_type = other RNA
gaagaacagcaaatgttata

SEQ ID NO: 4205 - RNA, 20 nt, synthetic construct
  source 1..20: mol_type = other RNA
aaaaagaagaacagcaaatg

SEQ ID NO: 4206 - RNA, 20 nt, synthetic construct
  source 1..20: mol_type = other RNA
gaataaaaaagaagaacagc

SEQ ID NO: 4207 - RNA, 20 nt, synthetic construct
  source 1..20: mol_type = other RNA
gtatataaaccaagtaagaa

SEQ ID NO: 4208 - RNA, 20 nt, synthetic construct
  source 1..20: mol_type = other RNA
agcttagtatataaaccaag

SEQ ID NO: 4209 - RNA, 20 nt, synthetic construct
  source 1..20: mol_type = other RNA
ggataataaagcttagtata

SEQ ID NO: 4210 - RNA, 20 nt, synthetic construct
  source 1..20: mol_type = other RNA
cttaaaaggataataaagct

SEQ ID NO: 4211 - RNA, 20 nt, synthetic construct
  source 1..20: mol_type = other RNA
gagaaagttttaaccttaaa

SEQ ID NO: 4212 - RNA, 20 nt, synthetic construct
  source 1..20: mol_type = other RNA
tccttgagaaagttttaacc

SEQ ID NO: 4213 - RNA, 20 nt, synthetic construct
  source 1..20: mol_type = other RNA
gttagtgtccttgagaaagt

SEQ ID NO: 4214 - RNA, 20 nt, synthetic construct
  source 1..20: mol_type = other RNA
acacattacagttagtgtcc

SEQ ID NO: 4215 - RNA, 20 nt, synthetic construct
  source 1..20: mol_type = other RNA
caagttgtacacattacagt

SEQ ID NO: 4216 - RNA, 20 nt, synthetic construct
  source 1..20: mol_type = other RNA
acgctggctaccaagttgta

SEQ ID NO: 4217 - RNA, 20 nt, synthetic construct
  source 1..20: mol_type = other RNA
ctatgtcaaatgttacgctg

SEQ ID NO: 4218 - RNA, 20 nt, synthetic construct
  source 1..20: mol_type = other RNA
caagacactatgtcaaatgt

SEQ ID NO: 4219 - RNA, 20 nt, synthetic construct
  source 1..20: mol_type = other RNA
tctttttacaagacactatg

SEQ ID NO: 4220 - RNA, 20 nt, synthetic construct
  source 1..20: mol_type = other RNA
gtatcttctttttacaagac

SEQ ID NO: 4221 - RNA, 20 nt, synthetic construct
  source 1..20: mol_type = other RNA
aactgattgagtatcttctt

SEQ ID NO: 4222 - RNA, 20 nt, synthetic construct
  source 1..20: mol_type = other RNA
tcaaaaactgattgagtatc

SEQ ID NO: 4223 - RNA, 20 nt, synthetic construct
  source 1..20: mol_type = other RNA
aatcattcaaaaactgattg

SEQ ID NO: 4224 - RNA, 20 nt, synthetic construct
  source 1..20: mol_type = other RNA
tactctttgaatcattcaaa

SEQ ID NO: 4225 - RNA, 20 nt, synthetic construct
  source 1..20: mol_type = other RNA
gccattattttactctttga

SEQ ID NO: 4226 - RNA, 20 nt, synthetic construct
  source 1..20: mol_type = other RNA
agaagttgccattattttac

SEQ ID NO: 4227 - RNA, 20 nt, synthetic construct
  source 1..20: mol_type = other RNA
gataaaagaagttgccatta

SEQ ID NO: 4228 - RNA, 20 nt, synthetic construct
  source 1..20: mol_type = other RNA
cactatggaagagataaaag

SEQ ID NO: 4229 - RNA, 20 nt, synthetic construct
  source 1..20: mol_type = other RNA
gattgcactatggaagagat

SEQ ID NO: 4230 - RNA, 20 nt, synthetic construct
  source 1..20: mol_type = other RNA
aaaatattgaagattgcact

SEQ ID NO: 4231 - RNA, 20 nt, synthetic construct
  source 1..20: mol_type = other RNA
gtttaaaaaatattgaagat

SEQ ID NO: 4232 - RNA, 20 nt, synthetic construct
  source 1..20: mol_type = other RNA
ccaatagttgtttaaaaaat

SEQ ID NO: 4233 - RNA, 20 nt, synthetic construct
  source 1..20: mol_type = other RNA
aattcagccaatagttgttt

SEQ ID NO: 4234 - RNA, 20 nt, synthetic construct
  source 1..20: mol_type = other RNA
cacaatggtagaattcagcc

SEQ ID NO: 4235 - RNA, 20 nt, synthetic construct
  source 1..20: mol_type = other RNA
ctaaaccacaatggtagaat

SEQ ID NO: 4236 - RNA, 20 nt, synthetic construct
  source 1..20: mol_type = other RNA
aagctctaaaccacaatggt

SEQ ID NO: 4237 - RNA, 20 nt, synthetic construct
  source 1..20: mol_type = other RNA
tctcagagaaagctctaaac

SEQ ID NO: 4238 - RNA, 20 nt, synthetic construct
  source 1..20: mol_type = other RNA
ccttagcaaaaatgtctcag

SEQ ID NO: 4239 - RNA, 20 nt, synthetic construct
  source 1..20: mol_type = other RNA
tcaaaaccttagcaaaaatg

SEQ ID NO: 4240 - RNA, 20 nt, synthetic construct
  source 1..20: mol_type = other RNA
cctgtttcaaaaccttagca

SEQ ID NO: 4241 - RNA, 20 nt, synthetic construct
  source 1..20: mol_type = other RNA
tggaacctgtttcaaaacct

SEQ ID NO: 4242 - RNA, 20 nt, synthetic construct
  source 1..20: mol_type = other RNA
ggaccaatttggaacctgtt

SEQ ID NO: 4243 - RNA, 20 nt, synthetic construct
  source 1..20: mol_type = other RNA
gtcactgtggaccaatttgg

SEQ ID NO: 4244 - RNA, 20 nt, synthetic construct
  source 1..20: mol_type = other RNA
cttggaggtcactgtggacc

SEQ ID NO: 4245 - RNA, 20 nt, synthetic construct
  source 1..20: mol_type = other RNA
tagagccttggaggtcactg

SEQ ID NO: 4246 - RNA, 20 nt, synthetic construct
  source 1..20: mol_type = other RNA
tcctgtagagccttggaggt

SEQ ID NO: 4247 - RNA, 20 nt, synthetic construct
  source 1..20: mol_type = other RNA
accactcctgtagagccttg

SEQ ID NO: 4248 - RNA, 20 nt, synthetic construct
  source 1..20: mol_type = other RNA
cttgaggaccactcctgtag

SEQ ID NO: 4249 - RNA, 20 nt, synthetic construct
  source 1..20: mol_type = other RNA
tgaagcttgaggaccactcc

SEQ ID NO: 4250 - RNA, 20 nt, synthetic construct
  source 1..20: mol_type = other RNA
atgagctgaagcttgaggac

SEQ ID NO: 4251 - RNA, 20 nt, synthetic construct
  source 1..20: mol_type = other RNA
ggcccaatgagctgaagctt

SEQ ID NO: 4252 - RNA, 20 nt, synthetic construct
  source 1..20: mol_type = other RNA
agtggggcccaatgagctga

SEQ ID NO: 4253 - RNA, 20 nt, synthetic construct
  source 1..20: mol_type = other RNA
ctgggagtggggcccaatga

SEQ ID NO: 4254 - RNA, 20 nt, synthetic construct
  source 1..20: mol_type = other RNA
tttcctgagacctactgaat

SEQ ID NO: 4255 - RNA, 20 nt, synthetic construct
  source 1..20: mol_type = other RNA
ggtcctttcctgagacctac

SEQ ID NO: 4256 - RNA, 20 nt, synthetic construct
  source 1..20: mol_type = other RNA
gttcttggtcctttcctgag

SEQ ID NO: 4257 - RNA, 20 nt, synthetic construct
  source 1..20: mol_type = other RNA
ggaatgtatgttcttggtcc

SEQ ID NO: 4258 - RNA, 20 nt, synthetic construct
  source 1..20: mol_type = other RNA
ccagtaggaatgtatgttct

SEQ ID NO: 4259 - RNA, 20 nt, synthetic construct
  source 1..20: mol_type = other RNA
attacccagtaggaatgtat

SEQ ID NO: 4260 - RNA, 20 nt, synthetic construct
  source 1..20: mol_type = other RNA
tcctcattacccagtaggaa

SEQ ID NO: 4261 - RNA, 20 nt, synthetic construct
  source 1..20: mol_type = other RNA
agcagcagcctcctcattac

SEQ ID NO: 4262 - RNA, 20 nt, synthetic construct
  source 1..20: mol_type = other RNA
ctactggaccagcagcagcc

SEQ ID NO: 4263 - RNA, 20 nt, synthetic construct
  source 1..20: mol_type = other RNA
tgtgactactggaccagcag

SEQ ID NO: 4264 - RNA, 20 nt, synthetic construct
  source 1..20: mol_type = other RNA
gaaagtgtgactactggacc

SEQ ID NO: 4265 - RNA, 20 nt, synthetic construct
  source 1..20: mol_type = other RNA
agtggctctgaaagtgtgac

SEQ ID NO: 4266 - RNA, 20 nt, synthetic construct
  source 1..20: mol_type = other RNA
tcacagggcagtggctctga

SEQ ID NO: 4267 - RNA, 20 nt, synthetic construct
  source 1..20: mol_type = other RNA
ccatgagctcacagggcagt

SEQ ID NO: 4268 - RNA, 20 nt, synthetic construct
  source 1..20: mol_type = other RNA
ggagtgccatgagctcacag

SEQ ID NO: 4269 - RNA, 20 nt, synthetic construct
  source 1..20: mol_type = other RNA
atcatggagtgccatgagct

SEQ ID NO: 4270 - RNA, 20 nt, synthetic construct
  source 1..20: mol_type = other RNA
tcagtgtggcgggaatcatg

SEQ ID NO: 4271 - RNA, 20 nt, synthetic construct
  source 1..20: mol_type = other RNA
gggattatgtcagtgtggcg

SEQ ID NO: 4272 - RNA, 20 nt, synthetic construct
  source 1..20: mol_type = other RNA
agctggggattatgtcagtg

SEQ ID NO: 4273 - RNA, 20 nt, synthetic construct
  source 1..20: mol_type = other RNA
actgaagtcagctggggatt

SEQ ID NO: 4274 - RNA, 20 nt, synthetic construct
  source 1..20: mol_type = other RNA
gcaagactgaagtcagctgg

SEQ ID NO: 4275 - RNA, 20 nt, synthetic construct
  source 1..20: mol_type = other RNA
acctggagtggagtaagcaa

SEQ ID NO: 4276 - RNA, 20 nt, synthetic construct
  source 1..20: mol_type = other RNA
gctgaacctggagtggagta

SEQ ID NO: 4277 - RNA, 20 nt, synthetic construct
  source 1..20: mol_type = other RNA
aaggaagctgaacctggagt

SEQ ID NO: 4278 - RNA, 20 nt, synthetic construct
  source 1..20: mol_type = other RNA
gtatgtaaggaagctgaacc

SEQ ID NO: 4279 - RNA, 20 nt, synthetic construct
  source 1..20: mol_type = other RNA
atgcctggtgtatgtaagga

SEQ ID NO: 4280 - RNA, 20 nt, synthetic construct
  source 1..20: mol_type = other RNA
aggagcatgcctggtgtatg

SEQ ID NO: 4281 - RNA, 20 nt, synthetic construct
  source 1..20: mol_type = other RNA
tgggcaggagcatgcctggt

SEQ ID NO: 4282 - RNA, 20 nt, synthetic construct
  source 1..20: mol_type = other RNA
aaagctctgggcaggagcat

SEQ ID NO: 4283 - RNA, 20 nt, synthetic construct
  source 1..20: mol_type = other RNA
aaaccacatgggcaaagctc

SEQ ID NO: 4284 - RNA, 20 nt, synthetic construct
  source 1..20: mol_type = other RNA
tggggaaaccacatgggcaa

SEQ ID NO: 4285 - RNA, 20 nt, synthetic construct
  source 1..20: mol_type = other RNA
gtatctggggaaaccacatg

SEQ ID NO: 4286 - RNA, 20 nt, synthetic construct
  source 1..20: mol_type = other RNA
acatgggtatctggggaaac

SEQ ID NO: 4287 - RNA, 20 nt, synthetic construct
  source 1..20: mol_type = other RNA
caagtacatgggtatctggg

SEQ ID NO: 4288 - RNA, 20 nt, synthetic construct
  source 1..20: mol_type = other RNA
gtaaaggaacaagtacatgg

SEQ ID NO: 4289 - RNA, 20 nt, synthetic construct
  source 1..20: mol_type = other RNA
gggaggtaaaggaacaagta

SEQ ID NO: 4290 - RNA, 20 nt, synthetic construct
  source 1..20: mol_type = other RNA
cctgagggaggtaaaggaac

SEQ ID NO: 4291 - RNA, 20 nt, synthetic construct
  source 1..20: mol_type = other RNA
ggaatgacctgagggaggta

SEQ ID NO: 4292 - RNA, 20 nt, synthetic construct
  source 1..20: mol_type = other RNA
ggtgacatatgaggaatgac

SEQ ID NO: 4293 - RNA, 20 nt, synthetic construct
  source 1..20: mol_type = other RNA
gagatggtgacatatgagga

SEQ ID NO: 4294 - RNA, 20 nt, synthetic construct
  source 1..20: mol_type = other RNA
cccactgagatggtgacata

SEQ ID NO: 4295 - RNA, 20 nt, synthetic construct
  source 1..20: mol_type = other RNA
aagggcccactgagatggtg

SEQ ID NO: 4296 - RNA, 20 nt, synthetic construct
  source 1..20: mol_type = other RNA
tatggaagggcccactgaga

SEQ ID NO: 4297 - RNA, 20 nt, synthetic construct
  source 1..20: mol_type = other RNA
tgggttttatggaagggccc

SEQ ID NO: 4298 - RNA, 20 nt, synthetic construct
  source 1..20: mol_type = other RNA
tttttaactgggttttatgg

SEQ ID NO: 4299 - RNA, 20 nt, synthetic construct
  source 1..20: mol_type = other RNA
tgttgccatttttaactggg

SEQ ID NO: 4300 - RNA, 20 nt, synthetic construct
  source 1..20: mol_type = other RNA
gagaaggatgttgccatttt

SEQ ID NO: 4301 - RNA, 20 nt, synthetic construct
  source 1..20: mol_type = other RNA
tgaggggagaaggatgttgc

SEQ ID NO: 4302 - RNA, 20 nt, synthetic construct
  source 1..20: mol_type = other RNA
gcgtgtgaggggagaaggat

SEQ ID NO: 4303 - RNA, 20 nt, synthetic construct
  source 1..20: mol_type = other RNA
agttagcgtgtgaggggaga

SEQ ID NO: 4304 - RNA, 20 nt, synthetic construct
  source 1..20: mol_type = other RNA
tgtgtgtcagttagcgtgtg

SEQ ID NO: 4305 - RNA, 20 nt, synthetic construct
  source 1..20: mol_type = other RNA
atgtgtgtgtgtcagttagc

SEQ ID NO: 4306 - RNA, 20 nt, synthetic construct
  source 1..20: mol_type = other RNA
tgctgtgtgagagagagagt

SEQ ID NO: 4307 - RNA, 20 nt, synthetic construct
  source 1..20: mol_type = other RNA
gtgtacgtatgctgtgtgag

SEQ ID NO: 4308 - RNA, 20 nt, synthetic construct
  source 1..20: mol_type = other RNA
ggagtgtgtgtacgtatgct

SEQ ID NO: 4309 - RNA, 20 nt, synthetic construct
  source 1..20: mol_type = other RNA
tgatagggagtgtgtgtacg

SEQ ID NO: 4310 - RNA, 20 nt, synthetic construct
  source 1..20: mol_type = other RNA
gcaggaaagggatatgatag

SEQ ID NO: 4311 - RNA, 20 nt, synthetic construct
  source 1..20: mol_type = other RNA
gcattgcaggaaagggatat

SEQ ID NO: 4312 - RNA, 20 nt, synthetic construct
  source 1..20: mol_type = other RNA
tggagaaaagcattgcagga

SEQ ID NO: 4313 - RNA, 20 nt, synthetic construct
  source 1..20: mol_type = other RNA
tggtatggagaaaagcattg

SEQ ID NO: 4314 - RNA, 20 nt, synthetic construct
  source 1..20: mol_type = other RNA
tcagatggtgtaaatggtat

SEQ ID NO: 4315 - RNA, 18 nt, synthetic construct
  source 1..18: mol_type = other RNA
gtgtggaaggacacaatt

SEQ ID NO: 4316 - RNA, 18 nt, synthetic construct
  source 1..18: mol_type = other RNA
ggacacaatttctgtagt

SEQ ID NO: 4317 - RNA, 18 nt, synthetic construct
  source 1..18: mol_type = other RNA
tgtagtttagttgactgc

SEQ ID NO: 4318 - RNA, 18 nt, synthetic construct
  source 1..18: mol_type = other RNA
agtttagttgactgcaga

SEQ ID NO: 4319 - RNA, 18 nt, synthetic construct
  source 1..18: mol_type = other RNA
ttagttgactgcagaggg

SEQ ID NO: 4320 - RNA, 18 nt, synthetic construct
  source 1..18: mol_type = other RNA
tagttgactgcagaggga

SEQ ID NO: 4321 - RNA, 19 nt, synthetic construct
  source 1..19: mol_type = other RNA
taaagcaagctgtgtggaa

SEQ ID NO: 4322 - RNA, 19 nt, synthetic construct
  source 1..19: mol_type = other RNA
gctgtgtggaaggacacaa

SEQ ID NO: 4323 - RNA, 19 nt, synthetic construct
  source 1..19: mol_type = other RNA
ctgtgtggaaggacacaat

SEQ ID NO: 4324 - RNA, 19 nt, synthetic construct
  source 1..19: mol_type = other RNA
tgtgtggaaggacacaatt

SEQ ID NO: 4325 - RNA, 19 nt, synthetic construct
  source 1..19: mol_type = other RNA
gtgtggaaggacacaattt

SEQ ID NO: 4326 - RNA, 19 nt, synthetic construct
  source 1..19: mol_type = other RNA
tggaaggacacaatttctg

SEQ ID NO: 4327 - RNA, 19 nt, synthetic construct
  source 1..19: mol_type = other RNA
ggaaggacacaatttctgt

SEQ ID NO: 4328 - RNA, 19 nt, synthetic construct
  source 1..19: mol_type = other RNA
gaaggacacaatttctgta

SEQ ID NO: 4329 - RNA, 19 nt, synthetic construct
  source 1..19: mol_type = other RNA
aaggacacaatttctgtag

SEQ ID NO: 4330 - RNA, 19 nt, synthetic construct
  source 1..19: mol_type = other RNA
aggacacaatttctgtagt

SEQ ID NO: 4331 - RNA, 19 nt, synthetic construct
  source 1..19: mol_type = other RNA
ggacacaatttctgtagtt

SEQ ID NO: 4332 - RNA, 19 nt, synthetic construct
  source 1..19: mol_type = other RNA
cacaatttctgtagtttag

SEQ ID NO: 4333 - RNA, 19 nt, synthetic construct
  source 1..19: mol_type = other RNA
acaatttctgtagtttagt

SEQ ID NO: 4334 - RNA, 19 nt, synthetic construct
  source 1..19: mol_type = other RNA
tttctgtagtttagttgac

SEQ ID NO: 4335 - RNA, 19 nt, synthetic construct
  source 1..19: mol_type = other RNA
tctgtagtttagttgactg

SEQ ID NO: 4336 - RNA, 19 nt, synthetic construct
  source 1..19: mol_type = other RNA
ctgtagtttagttgactgc

SEQ ID NO: 4337 - RNA, 19 nt, synthetic construct
  source 1..19: mol_type = other RNA
tgtagtttagttgactgca

SEQ ID NO: 4338 - RNA, 19 nt, synthetic construct
  source 1..19: mol_type = other RNA
tagtttagttgactgcaga

SEQ ID NO: 4339 - RNA, 19 nt, synthetic construct
  source 1..19: mol_type = other RNA
agtttagttgactgcagag

SEQ ID NO: 4340 - RNA, 19 nt, synthetic construct
  source 1..19: mol_type = other RNA
gtttagttgactgcagagg

SEQ ID NO: 4341 - RNA, 19 nt, synthetic construct
  source 1..19: mol_type = other RNA
tttagttgactgcagaggg

SEQ ID NO: 4342 - RNA, 19 nt, synthetic construct
  source 1..19: mol_type = other RNA
ttagttgactgcagaggga

SEQ ID NO: 4343 - RNA, 19 nt, synthetic construct
  source 1..19: mol_type = other RNA
tagttgactgcagagggag

SEQ ID NO: 4344 - RNA, 19 nt, synthetic construct
  source 1..19: mol_type = other RNA
agttgactgcagagggagg

SEQ ID NO: 4345 - RNA, 20 nt, synthetic construct
  source 1..20: mol_type = other RNA
tatttttaaagcaagctgtg

SEQ ID NO: 4346 - RNA, 20 nt, synthetic construct
  source 1..20: mol_type = other RNA
atttttaaagcaagctgtgt

SEQ ID NO: 4347 - RNA, 20 nt, synthetic construct
  source 1..20: mol_type = other RNA
ttaaagcaagctgtgtggaa

SEQ ID NO: 4348 - RNA, 20 nt, synthetic construct
  source 1..20: mol_type = other RNA
taaagcaagctgtgtggaag

SEQ ID NO: 4349 - RNA, 20 nt, synthetic construct
  source 1..20: mol_type = other RNA
aagcaagctgtgtggaagga

SEQ ID NO: 4350 - RNA, 20 nt, synthetic construct
  source 1..20: mol_type = other RNA
agcaagctgtgtggaaggac

SEQ ID NO: 4351 - RNA, 20 nt, synthetic construct
  source 1..20: mol_type = other RNA
agctgtgtggaaggacacaa

SEQ ID NO: 4352 - RNA, 20 nt, synthetic construct
  source 1..20: mol_type = other RNA
gctgtgtggaaggacacaat

SEQ ID NO: 4353 - RNA, 20 nt, synthetic construct
  source 1..20: mol_type = other RNA
tgtgtggaaggacacaattt

SEQ ID NO: 4354 - RNA, 20 nt, synthetic construct
  source 1..20: mol_type = other RNA
gtgtggaaggacacaatttc

SEQ ID NO: 4355 - RNA, 20 nt, synthetic construct
  source 1..20: mol_type = other RNA
tgtggaaggacacaatttct

SEQ ID NO: 4356 - RNA, 20 nt, synthetic construct
  source 1..20: mol_type = other RNA
gtggaaggacacaatttctg

SEQ ID NO: 4357 - RNA, 20 nt, synthetic construct
  source 1..20: mol_type = other RNA
tggaaggacacaatttctgt

SEQ ID NO: 4358 - RNA, 20 nt, synthetic construct
  source 1..20: mol_type = other RNA
ggaaggacacaatttctgta

SEQ ID NO: 4359 - RNA, 20 nt, synthetic construct
  source 1..20: mol_type = other RNA
gaaggacacaatttctgtag

SEQ ID NO: 4360 - RNA, 20 nt, synthetic construct
  source 1..20: mol_type = other RNA
aaggacacaatttctgtagt

SEQ ID NO: 4361 - RNA, 20 nt, synthetic construct
  source 1..20: mol_type = other RNA
aggacacaatttctgtagtt

SEQ ID NO: 4362 - RNA, 20 nt, synthetic construct
  source 1..20: mol_type = other RNA
ggacacaatttctgtagttt

SEQ ID NO: 4363 - RNA, 20 nt, synthetic construct
  source 1..20: mol_type = other RNA
gacacaatttctgtagttta

SEQ ID NO: 4364 - RNA, 20 nt, synthetic construct
  source 1..20: mol_type = other RNA
acacaatttctgtagtttag

SEQ ID NO: 4365 - RNA, 20 nt, synthetic construct
  source 1..20: mol_type = other RNA
cacaatttctgtagtttagt

SEQ ID NO: 4366 - RNA, 20 nt, synthetic construct
  source 1..20: mol_type = other RNA
acaatttctgtagtttagtt

SEQ ID NO: 4367 - RNA, 20 nt, synthetic construct
  source 1..20: mol_type = other RNA
aatttctgtagtttagttga

SEQ ID NO: 4368 - RNA, 20 nt, synthetic construct
  source 1..20: mol_type = other RNA
atttctgtagtttagttgac

SEQ ID NO: 4369 - RNA, 20 nt, synthetic construct
  source 1..20: mol_type = other RNA
tttctgtagtttagttgact

SEQ ID NO: 4370 - RNA, 20 nt, synthetic construct
  source 1..20: mol_type = other RNA
ttctgtagtttagttgactg

SEQ ID NO: 4371 - RNA, 20 nt, synthetic construct
  source 1..20: mol_type = other RNA
tctgtagtttagttgactgc

SEQ ID NO: 4372 - RNA, 20 nt, synthetic construct
  source 1..20: mol_type = other RNA
ctgtagtttagttgactgca

SEQ ID NO: 4373 - RNA, 20 nt, synthetic construct
  source 1..20: mol_type = other RNA
tgtagtttagttgactgcag

SEQ ID NO: 4374 - RNA, 20 nt, synthetic construct
  source 1..20: mol_type = other RNA
gtagtttagttgactgcaga

SEQ ID NO: 4375 - RNA, 20 nt, synthetic construct
  source 1..20: mol_type = other RNA
tagtttagttgactgcagag

SEQ ID NO: 4376 - RNA, 20 nt, synthetic construct
  source 1..20: mol_type = other RNA
agtttagttgactgcagagg

SEQ ID NO: 4377 - RNA, 20 nt, synthetic construct
  source 1..20: mol_type = other RNA
gtttagttgactgcagaggg

SEQ ID NO: 4378 - RNA, 20 nt, synthetic construct
  source 1..20: mol_type = other RNA
tttagttgactgcagaggga

SEQ ID NO: 4379 - RNA, 20 nt, synthetic construct
  source 1..20: mol_type = other RNA
ttagttgactgcagagggag

SEQ ID NO: 4380 - RNA, 20 nt, synthetic construct
  source 1..20: mol_type = other RNA
tagttgactgcagagggagg

SEQ ID NO: 4381 - RNA, 20 nt, synthetic construct
  source 1..20: mol_type = other RNA
agttgactgcagagggaggc

SEQ ID NO: 4382 - RNA, 21 nt, synthetic construct
  source 1..21: mol_type = other RNA
atgtatttttaaagcaagctg

SEQ ID NO: 4383 - RNA, 21 nt, synthetic construct
  source 1..21: mol_type = other RNA
gtatttttaaagcaagctgtg

SEQ ID NO: 4384 - RNA, 21 nt, synthetic construct
  source 1..21: mol_type = other RNA
tatttttaaagcaagctgtgt

SEQ ID NO: 4385 - RNA, 21 nt, synthetic construct
  source 1..21: mol_type = other RNA
atttttaaagcaagctgtgtg

SEQ ID NO: 4386 - RNA, 21 nt, synthetic construct
  source 1..21: mol_type = other RNA
tttttaaagcaagctgtgtgg

SEQ ID NO: 4387 - RNA, 21 nt, synthetic construct
  source 1..21: mol_type = other RNA
tttaaagcaagctgtgtggaa

SEQ ID NO: 4388 - RNA, 21 nt, synthetic construct
  source 1..21: mol_type = other RNA
ttaaagcaagctgtgtggaag

SEQ ID NO: 4389 - RNA, 21 nt, synthetic construct
  source 1..21: mol_type = other RNA
taaagcaagctgtgtggaagg

SEQ ID NO: 4390 - RNA, 21 nt, synthetic construct
  source 1..21: mol_type = other RNA
aaagcaagctgtgtggaagga

SEQ ID NO: 4391 - RNA, 21 nt, synthetic construct
  source 1..21: mol_type = other RNA
aagcaagctgtgtggaaggac

SEQ ID NO: 4392 - RNA, 21 nt, synthetic construct
  source 1..21: mol_type = other RNA
agcaagctgtgtggaaggaca

SEQ ID NO: 4393 - RNA, 21 nt, synthetic construct
  source 1..21: mol_type = other RNA
aagctgtgtggaaggacacaa

SEQ ID NO: 4394 - RNA, 21 nt, synthetic construct
  source 1..21: mol_type = other RNA
agctgtgtggaaggacacaat

SEQ ID NO: 4395 - RNA, 21 nt, synthetic construct
  source 1..21: mol_type = other RNA
gctgtgtggaaggacacaatt

SEQ ID NO: 4396 - RNA, 21 nt, synthetic construct
  source 1..21: mol_type = other RNA
ctgtgtggaaggacacaattt

SEQ ID NO: 4397 - RNA, 21 nt, synthetic construct
  source 1..21: mol_type = other RNA
tgtgtggaaggacacaatttc

SEQ ID NO: 4398 - RNA, 21 nt, synthetic construct
  source 1..21: mol_type = other RNA
gtgtggaaggacacaatttct

SEQ ID NO: 4399 - RNA, 21 nt, synthetic construct
  source 1..21: mol_type = other RNA
tgtggaaggacacaatttctg

SEQ ID NO: 4400 - RNA, 21 nt, synthetic construct
  source 1..21: mol_type = other RNA
gtggaaggacacaatttctgt

SEQ ID NO: 4401 - RNA, 21 nt, synthetic construct
  source 1..21: mol_type = other RNA
tggaaggacacaatttctgta

SEQ ID NO: 4402 - RNA, 21 nt, synthetic construct
  source 1..21: mol_type = other RNA
ggaaggacacaatttctgtag

SEQ ID NO: 4403 - RNA, 21 nt, synthetic construct
  source 1..21: mol_type = other RNA
gaaggacacaatttctgtagt

SEQ ID NO: 4404 - RNA, 21 nt, synthetic construct
  source 1..21: mol_type = other RNA
aaggacacaatttctgtagtt

SEQ ID NO: 4405 - RNA, 21 nt, synthetic construct
  source 1..21: mol_type = other RNA
aggacacaatttctgtagttt

SEQ ID NO: 4406 - RNA, 21 nt, synthetic construct
  source 1..21: mol_type = other RNA
ggacacaatttctgtagttta

SEQ ID NO: 4407 - RNA, 21 nt, synthetic construct
  source 1..21: mol_type = other RNA
gacacaatttctgtagtttag

SEQ ID NO: 4408 - RNA, 21 nt, synthetic construct
  source 1..21: mol_type = other RNA
acacaatttctgtagtttagt

SEQ ID NO: 4409 - RNA, 21 nt, synthetic construct
  source 1..21: mol_type = other RNA
cacaatttctgtagtttagtt

SEQ ID NO: 4410 - RNA, 21 nt, synthetic construct
  source 1..21: mol_type = other RNA
acaatttctgtagtttagttg

SEQ ID NO: 4411 - RNA, 21 nt, synthetic construct
  source 1..21: mol_type = other RNA
caatttctgtagtttagttga

SEQ ID NO: 4412 - RNA, 21 nt, synthetic construct
  source 1..21: mol_type = other RNA
aatttctgtagtttagttgac

SEQ ID NO: 4413 - RNA, 21 nt, synthetic construct
  source 1..21: mol_type = other RNA
atttctgtagtttagttgact

SEQ ID NO: 4414 - RNA, 21 nt, synthetic construct
  source 1..21: mol_type = other RNA
tttctgtagtttagttgactg

SEQ ID NO: 4415 - RNA, 21 nt, synthetic construct
  source 1..21: mol_type = other RNA
ttctgtagtttagttgactgc

SEQ ID NO: 4416 - RNA, 21 nt, synthetic construct
  source 1..21: mol_type = other RNA
tctgtagtttagttgactgca

SEQ ID NO: 4417 - RNA, 21 nt, synthetic construct
  source 1..21: mol_type = other RNA
ctgtagtttagttgactgcag

SEQ ID NO: 4418 - RNA, 21 nt, synthetic construct
  source 1..21: mol_type = other RNA
tgtagtttagttgactgcaga

SEQ ID NO: 4419 - RNA, 21 nt, synthetic construct
  source 1..21: mol_type = other RNA
gtagtttagttgactgcagag

SEQ ID NO: 4420 - RNA, 21 nt, synthetic construct
  source 1..21: mol_type = other RNA
tagtttagttgactgcagagg

SEQ ID NO: 4421 - RNA, 21 nt, synthetic construct
  source 1..21: mol_type = other RNA
agtttagttgactgcagaggg

SEQ ID NO: 4422 - RNA, 21 nt, synthetic construct
  source 1..21: mol_type = other RNA
gtttagttgactgcagaggga

SEQ ID NO: 4423 - RNA, 21 nt, synthetic construct
  source 1..21: mol_type = other RNA
tttagttgactgcagagggag

SEQ ID NO: 4424 - RNA, 21 nt, synthetic construct
  source 1..21: mol_type = other RNA
ttagttgactgcagagggagg

SEQ ID NO: 4425 - RNA, 21 nt, synthetic construct
  source 1..21: mol_type = other RNA
tagttgactgcagagggaggc

SEQ ID NO: 4426 - RNA, 21 nt, synthetic construct
  source 1..21: mol_type = other RNA
agttgactgcagagggaggca

SEQ ID NO: 4427 - RNA, 21 nt, synthetic construct
  source 1..21: mol_type = other RNA
gttgactgcagagggaggcag

SEQ ID NO: 4428 - RNA, 22 nt, synthetic construct
  source 1..22: mol_type = other RNA
atgtatttttaaagcaagctgt

SEQ ID NO: 4429 - RNA, 22 nt, synthetic construct
  source 1..22: mol_type = other RNA
tgtatttttaaagcaagctgtg

SEQ ID NO: 4430 - RNA, 22 nt, synthetic construct
  source 1..22: mol_type = other RNA
gtatttttaaagcaagctgtgt

SEQ ID NO: 4431 - RNA, 22 nt, synthetic construct
  source 1..22: mol_type = other RNA
tatttttaaagcaagctgtgtg

SEQ ID NO: 4432 - RNA, 22 nt, synthetic construct
  source 1..22: mol_type = other RNA
atttttaaagcaagctgtgtgg

SEQ ID NO: 4433 - RNA, 22 nt, synthetic construct
  source 1..22: mol_type = other RNA
tttttaaagcaagctgtgtgga

SEQ ID NO: 4434 - RNA, 22 nt, synthetic construct
  source 1..22: mol_type = other RNA
ttttaaagcaagctgtgtggaa

SEQ ID NO: 4435 - RNA, 22 nt, synthetic construct
  source 1..22: mol_type = other RNA
tttaaagcaagctgtgtggaag

SEQ ID NO: 4436 - RNA, 22 nt, synthetic construct
  source 1..22: mol_type = other RNA
ttaaagcaagctgtgtggaagg

SEQ ID NO: 4437 - RNA, 22 nt, synthetic construct
  source 1..22: mol_type = other RNA
taaagcaagctgtgtggaagga

SEQ ID NO: 4438 - RNA, 22 nt, synthetic construct
  source 1..22: mol_type = other RNA
aaagcaagctgtgtggaaggac

SEQ ID NO: 4439 - RNA, 22 nt, synthetic construct
  source 1..22: mol_type = other RNA
aagcaagctgtgtggaaggaca

SEQ ID NO: 4440 - RNA, 22 nt, synthetic construct
  source 1..22: mol_type = other RNA
agcaagctgtgtggaaggacac

SEQ ID NO: 4441 - RNA, 22 nt, synthetic construct
  source 1..22: mol_type = other RNA
caagctgtgtggaaggacacaa

SEQ ID NO: 4442 - RNA, 22 nt, synthetic construct
  source 1..22: mol_type = other RNA
aagctgtgtggaaggacacaat

SEQ ID NO: 4443 - RNA, 22 nt, synthetic construct
  source 1..22: mol_type = other RNA
agctgtgtggaaggacacaatt

SEQ ID NO: 4444 - RNA, 22 nt, synthetic construct
  source 1..22: mol_type = other RNA
gctgtgtggaaggacacaattt

SEQ ID NO: 4445 - RNA, 22 nt, synthetic construct
  source 1..22: mol_type = other RNA
ctgtgtggaaggacacaatttc

SEQ ID NO: 4446 - RNA, 22 nt, synthetic construct
  source 1..22: mol_type = other RNA
tgtgtggaaggacacaatttct

SEQ ID NO: 4447 - RNA, 22 nt, synthetic construct
  source 1..22: mol_type = other RNA
gtgtggaaggacacaatttctg

SEQ ID NO: 4448 - RNA, 22 nt, synthetic construct
  source 1..22: mol_type = other RNA
tgtggaaggacacaatttctgt

SEQ ID NO: 4449 - RNA, 22 nt, synthetic construct
  source 1..22: mol_type = other RNA
gtggaaggacacaatttctgta

SEQ ID NO: 4450 - RNA, 22 nt, synthetic construct
  source 1..22: mol_type = other RNA
tggaaggacacaatttctgtag

SEQ ID NO: 4451 - RNA, 22 nt, synthetic construct
  source 1..22: mol_type = other RNA
ggaaggacacaatttctgtagt

SEQ ID NO: 4452 - RNA, 22 nt, synthetic construct
  source 1..22: mol_type = other RNA
gaaggacacaatttctgtagtt

SEQ ID NO: 4453 - RNA, 22 nt, synthetic construct
  source 1..22: mol_type = other RNA
aaggacacaatttctgtagttt

SEQ ID NO: 4454 - RNA, 22 nt, synthetic construct
  source 1..22: mol_type = other RNA
aggacacaatttctgtagttta

SEQ ID NO: 4455 - RNA, 22 nt, synthetic construct
  source 1..22: mol_type = other RNA
ggacacaatttctgtagtttag

SEQ ID NO: 4456 - RNA, 22 nt, synthetic construct
  source 1..22: mol_type = other RNA
gacacaatttctgtagtttagt

SEQ ID NO: 4457 - RNA, 22 nt, synthetic construct
  source 1..22: mol_type = other RNA
acacaatttctgtagtttagtt

SEQ ID NO: 4458 - RNA, 22 nt, synthetic construct
  source 1..22: mol_type = other RNA
cacaatttctgtagtttagttg

SEQ ID NO: 4459 - RNA, 22 nt, synthetic construct
  source 1..22: mol_type = other RNA
acaatttctgtagtttagttga

SEQ ID NO: 4460 - RNA, 22 nt, synthetic construct
  source 1..22: mol_type = other RNA
caatttctgtagtttagttgac

SEQ ID NO: 4461 - RNA, 22 nt, synthetic construct
  source 1..22: mol_type = other RNA
aatttctgtagtttagttgact

SEQ ID NO: 4462 - RNA, 22 nt, synthetic construct
  source 1..22: mol_type = other RNA
atttctgtagtttagttgactg

SEQ ID NO: 4463 - RNA, 22 nt, synthetic construct
  source 1..22: mol_type = other RNA
tttctgtagtttagttgactgc

SEQ ID NO: 4464 - RNA, 22 nt, synthetic construct
  source 1..22: mol_type = other RNA
ttctgtagtttagttgactgca

SEQ ID NO: 4465 - RNA, 22 nt, synthetic construct
  source 1..22: mol_type = other RNA
tctgtagtttagttgactgcag

SEQ ID NO: 4466 - RNA, 22 nt, synthetic construct
  source 1..22: mol_type = other RNA
ctgtagtttagttgactgcaga

SEQ ID NO: 4467 - RNA, 22 nt, synthetic construct
  source 1..22: mol_type = other RNA
tgtagtttagttgactgcagag

SEQ ID NO: 4468 - RNA, 22 nt, synthetic construct
  source 1..22: mol_type = other RNA
gtagtttagttgactgcagagg

SEQ ID NO: 4469 - RNA, 22 nt, synthetic construct
  source 1..22: mol_type = other RNA
tagtttagttgactgcagaggg

SEQ ID NO: 4470 - RNA, 22 nt, synthetic construct
  source 1..22: mol_type = other RNA
agtttagttgactgcagaggga

SEQ ID NO: 4471 - RNA, 22 nt, synthetic construct
  source 1..22: mol_type = other RNA
gtttagttgactgcagagggag

SEQ ID NO: 4472 - RNA, 22 nt, synthetic construct
  source 1..22: mol_type = other RNA
tttagttgactgcagagggagg

SEQ ID NO: 4473 - RNA, 22 nt, synthetic construct
  source 1..22: mol_type = other RNA
ttagttgactgcagagggaggc

SEQ ID NO: 4474 - RNA, 22 nt, synthetic construct
  source 1..22: mol_type = other RNA
tagttgactgcagagggaggca

SEQ ID NO: 4475 - RNA, 22 nt, synthetic construct
  source 1..22: mol_type = other RNA
agttgactgcagagggaggcag

SEQ ID NO: 4476 - RNA, 23 nt, synthetic construct
  source 1..23: mol_type = other RNA
atgtatttttaaagcaagctgtg

SEQ ID NO: 4477 - RNA, 23 nt, synthetic construct
  source 1..23: mol_type = other RNA
tgtatttttaaagcaagctgtgt

SEQ ID NO: 4478 - RNA, 23 nt, synthetic construct
  source 1..23: mol_type = other RNA
gtatttttaaagcaagctgtgtg

SEQ ID NO: 4479 - RNA, 23 nt, synthetic construct
  source 1..23: mol_type = other RNA
tatttttaaagcaagctgtgtgg

SEQ ID NO: 4480 - RNA, 23 nt, synthetic construct
  source 1..23: mol_type = other RNA
atttttaaagcaagctgtgtgga

SEQ ID NO: 4481 - RNA, 23 nt, synthetic construct
  source 1..23: mol_type = other RNA
tttttaaagcaagctgtgtggaa

SEQ ID NO: 4482 - RNA, 23 nt, synthetic construct
  source 1..23: mol_type = other RNA
ttttaaagcaagctgtgtggaag

SEQ ID NO: 4483 - RNA, 23 nt, synthetic construct
  source 1..23: mol_type = other RNA
tttaaagcaagctgtgtggaagg

SEQ ID NO: 4484 - RNA, 23 nt, synthetic construct
  source 1..23: mol_type = other RNA
ttaaagcaagctgtgtggaagga

SEQ ID NO: 4485 - RNA, 23 nt, synthetic construct
  source 1..23: mol_type = other RNA
taaagcaagctgtgtggaaggac

SEQ ID NO: 4486 - RNA, 23 nt, synthetic construct
  source 1..23: mol_type = other RNA
aaagcaagctgtgtggaaggaca

SEQ ID NO: 4487 - RNA, 23 nt, synthetic construct
  source 1..23: mol_type = other RNA
aagcaagctgtgtggaaggacac

SEQ ID NO: 4488 - RNA, 23 nt, synthetic construct
  source 1..23: mol_type = other RNA
agcaagctgtgtggaaggacaca

SEQ ID NO: 4489 - RNA, 23 nt, synthetic construct
  source 1..23: mol_type = other RNA
gcaagctgtgtggaaggacacaa

SEQ ID NO: 4490 - RNA, 23 nt, synthetic construct
  source 1..23: mol_type = other RNA
caagctgtgtggaaggacacaat

SEQ ID NO: 4491 - RNA, 23 nt, synthetic construct
  source 1..23: mol_type = other RNA
aagctgtgtggaaggacacaatt

SEQ ID NO: 4492 - RNA, 23 nt, synthetic construct
  source 1..23: mol_type = other RNA
agctgtgtggaaggacacaattt

SEQ ID NO: 4493 - RNA, 23 nt, synthetic construct
  source 1..23: mol_type = other RNA
gctgtgtggaaggacacaatttc

SEQ ID NO: 4494 - RNA, 23 nt, synthetic construct
  source 1..23: mol_type = other RNA
ctgtgtggaaggacacaatttct

SEQ ID NO: 4495 - RNA, 23 nt, synthetic construct
  source 1..23: mol_type = other RNA
tgtgtggaaggacacaatttctg

SEQ ID NO: 4496 - RNA, 23 nt, synthetic construct
  source 1..23: mol_type = other RNA
gtgtggaaggacacaatttctgt

SEQ ID NO: 4497 - RNA, 23 nt, synthetic construct
  source 1..23: mol_type = other RNA
tgtggaaggacacaatttctgta

SEQ ID NO: 4498 - RNA, 23 nt, synthetic construct
  source 1..23: mol_type = other RNA
gtggaaggacacaatttctgtag

SEQ ID NO: 4499 - RNA, 23 nt, synthetic construct
  source 1..23: mol_type = other RNA
tggaaggacacaatttctgtagt

SEQ ID NO: 4500 - RNA, 23 nt, synthetic construct
  source 1..23: mol_type = other RNA
ggaaggacacaatttctgtagtt

SEQ ID NO: 4501 - RNA, 23 nt, synthetic construct
  source 1..23: mol_type = other RNA
gaaggacacaatttctgtagttt

SEQ ID NO: 4502 - RNA, 23 nt, synthetic construct
  source 1..23: mol_type = other RNA
aaggacacaatttctgtagttta

SEQ ID NO: 4503 - RNA, 23 nt, synthetic construct
  source 1..23: mol_type = other RNA
aggacacaatttctgtagtttag

SEQ ID NO: 4504 - RNA, 23 nt, synthetic construct
  source 1..23: mol_type = other RNA
ggacacaatttctgtagtttagt

SEQ ID NO: 4505 - RNA, 23 nt, synthetic construct
  source 1..23: mol_type = other RNA
gacacaatttctgtagtttagtt

SEQ ID NO: 4506 - RNA, 23 nt, synthetic construct
  source 1..23: mol_type = other RNA
acacaatttctgtagtttagttg

SEQ ID NO: 4507 - RNA, 23 nt, synthetic construct
  source 1..23: mol_type = other RNA
cacaatttctgtagtttagttga

SEQ ID NO: 4508 - RNA, 23 nt, synthetic construct
  source 1..23: mol_type = other RNA
acaatttctgtagtttagttgac

SEQ ID NO: 4509 - RNA, 23 nt, synthetic construct
  source 1..23: mol_type = other RNA
caatttctgtagtttagttgact

SEQ ID NO: 4510 - RNA, 23 nt, synthetic construct
  source 1..23: mol_type = other RNA
aatttctgtagtttagttgactg

SEQ ID NO: 4511 - RNA, 23 nt, synthetic construct
  source 1..23: mol_type = other RNA
atttctgtagtttagttgactgc

SEQ ID NO: 4512 - RNA, 23 nt, synthetic construct
  source 1..23: mol_type = other RNA
tttctgtagtttagttgactgca

SEQ ID NO: 4513 - RNA, 23 nt, synthetic construct
  source 1..23: mol_type = other RNA
ttctgtagtttagttgactgcag

SEQ ID NO: 4514 - RNA, 23 nt, synthetic construct
  source 1..23: mol_type = other RNA
tctgtagtttagttgactgcaga

SEQ ID NO: 4515 - RNA, 23 nt, synthetic construct
  source 1..23: mol_type = other RNA
ctgtagtttagttgactgcagag

SEQ ID NO: 4516 - RNA, 23 nt, synthetic construct
  source 1..23: mol_type = other RNA
tgtagtttagttgactgcagagg

SEQ ID NO: 4517 - RNA, 23 nt, synthetic construct
  source 1..23: mol_type = other RNA
gtagtttagttgactgcagaggg

SEQ ID NO: 4518 - RNA, 23 nt, synthetic construct
  source 1..23: mol_type = other RNA
tagtttagttgactgcagaggga

SEQ ID NO: 4519 - RNA, 23 nt, synthetic construct
  source 1..23: mol_type = other RNA
agtttagttgactgcagagggag

SEQ ID NO: 4520 - RNA, 23 nt, synthetic construct
  source 1..23: mol_type = other RNA
gtttagttgactgcagagggagg

SEQ ID NO: 4521 - RNA, 23 nt, synthetic construct
  source 1..23: mol_type = other RNA
tttagttgactgcagagggaggc

SEQ ID NO: 4522 - RNA, 23 nt, synthetic construct
  source 1..23: mol_type = other RNA
ttagttgactgcagagggaggca

SEQ ID NO: 4523 - RNA, 23 nt, synthetic construct
  source 1..23: mol_type = other RNA
tagttgactgcagagggaggcag

SEQ ID NO: 4524 - RNA, 24 nt, synthetic construct
  source 1..24: mol_type = other RNA
atgtatttttaaagcaagctgtgt

SEQ ID NO: 4525 - RNA, 24 nt, synthetic construct
  source 1..24: mol_type = other RNA
tgtatttttaaagcaagctgtgtg

SEQ ID NO: 4526 - RNA, 24 nt, synthetic construct
  source 1..24: mol_type = other RNA
gtatttttaaagcaagctgtgtgg

SEQ ID NO: 4527 - RNA, 24 nt, synthetic construct
  source 1..24: mol_type = other RNA
tatttttaaagcaagctgtgtgga

SEQ ID NO: 4528 - RNA, 24 nt, synthetic construct
  source 1..24: mol_type = other RNA
atttttaaagcaagctgtgtggaa

SEQ ID NO: 4529 - RNA, 24 nt, synthetic construct
  source 1..24: mol_type = other RNA
tttttaaagcaagctgtgtggaag

SEQ ID NO: 4530 - RNA, 24 nt, synthetic construct
  source 1..24: mol_type = other RNA
ttttaaagcaagctgtgtggaagg

SEQ ID NO: 4531 - RNA, 24 nt, synthetic construct
  source 1..24: mol_type = other RNA
tttaaagcaagctgtgtggaagga

SEQ ID NO: 4532 - RNA, 24 nt, synthetic construct
  source 1..24: mol_type = other RNA
ttaaagcaagctgtgtggaaggac

SEQ ID NO: 4533 - RNA, 24 nt, synthetic construct
  source 1..24: mol_type = other RNA
taaagcaagctgtgtggaaggaca

SEQ ID NO: 4534 - RNA, 24 nt, synthetic construct
  source 1..24: mol_type = other RNA
aaagcaagctgtgtggaaggacac

SEQ ID NO: 4535 - RNA, 24 nt, synthetic construct
  source 1..24: mol_type = other RNA
aagcaagctgtgtggaaggacaca

SEQ ID NO: 4536 - RNA, 24 nt, synthetic construct
  source 1..24: mol_type = other RNA
agcaagctgtgtggaaggacacaa

SEQ ID NO: 4537 - RNA, 24 nt, synthetic construct
  source 1..24: mol_type = other RNA
gcaagctgtgtggaaggacacaat

SEQ ID NO: 4538 - RNA, 24 nt, synthetic construct
  source 1..24: mol_type = other RNA
caagctgtgtggaaggacacaatt

SEQ ID NO: 4539 - RNA, 24 nt, synthetic construct
  source 1..24: mol_type = other RNA
aagctgtgtggaaggacacaattt

SEQ ID NO: 4540 - RNA, 24 nt, synthetic construct
  source 1..24: mol_type = other RNA
agctgtgtggaaggacacaatttc

SEQ ID NO: 4541 - RNA, 24 nt, synthetic construct
  source 1..24: mol_type = other RNA
gctgtgtggaaggacacaatttct

SEQ ID NO: 4542 - RNA, 24 nt, synthetic construct
  source 1..24: mol_type = other RNA
ctgtgtggaaggacacaatttctg

SEQ ID NO: 4543 - RNA, 24 nt, synthetic construct
  source 1..24: mol_type = other RNA
tgtgtggaaggacacaatttctgt

SEQ ID NO: 4544 - RNA, 24 nt, synthetic construct
  source 1..24: mol_type = other RNA
gtgtggaaggacacaatttctgta

SEQ ID NO: 4545 - RNA, 24 nt, synthetic construct
  source 1..24: mol_type = other RNA
tgtggaaggacacaatttctgtag

SEQ ID NO: 4546 - RNA, 24 nt, synthetic construct
  source 1..24: mol_type = other RNA
gtggaaggacacaatttctgtagt

SEQ ID NO: 4547 - RNA, 24 nt, synthetic construct
  source 1..24: mol_type = other RNA
tggaaggacacaatttctgtagtt

SEQ ID NO: 4548 - RNA, 24 nt, synthetic construct
  source 1..24: mol_type = other RNA
ggaaggacacaatttctgtagttt

SEQ ID NO: 4549 - RNA, 24 nt, synthetic construct
  source 1..24: mol_type = other RNA
gaaggacacaatttctgtagttta

SEQ ID NO: 4550 - RNA, 24 nt, synthetic construct
  source 1..24: mol_type = other RNA
aaggacacaatttctgtagtttag

SEQ ID NO: 4551 - RNA, 24 nt, synthetic construct
  source 1..24: mol_type = other RNA
aggacacaatttctgtagtttagt

SEQ ID NO: 4552 - RNA, 24 nt, synthetic construct
  source 1..24: mol_type = other RNA
ggacacaatttctgtagtttagtt

SEQ ID NO: 4553 - RNA, 24 nt, synthetic construct
  source 1..24: mol_type = other RNA
gacacaatttctgtagtttagttg

SEQ ID NO: 4554 - RNA, 24 nt, synthetic construct
  source 1..24: mol_type = other RNA
acacaatttctgtagtttagttga

SEQ ID NO: 4555 - RNA, 24 nt, synthetic construct
  source 1..24: mol_type = other RNA
cacaatttctgtagtttagttgac

SEQ ID NO: 4556 - RNA, 24 nt, synthetic construct
  source 1..24: mol_type = other RNA
acaatttctgtagtttagttgact

SEQ ID NO: 4557 - RNA, 24 nt, synthetic construct
  source 1..24: mol_type = other RNA
caatttctgtagtttagttgactg

SEQ ID NO: 4558 - RNA, 24 nt, synthetic construct
  source 1..24: mol_type = other RNA
aatttctgtagtttagttgactgc

SEQ ID NO: 4559 - RNA, 24 nt, synthetic construct
  source 1..24: mol_type = other RNA
atttctgtagtttagttgactgca

SEQ ID NO: 4560 - RNA, 24 nt, synthetic construct
  source 1..24: mol_type = other RNA
tttctgtagtttagttgactgcag

SEQ ID NO: 4561 - RNA, 24 nt, synthetic construct
  source 1..24: mol_type = other RNA
ttctgtagtttagttgactgcaga

SEQ ID NO: 4562 - RNA, 24 nt, synthetic construct
  source 1..24: mol_type = other RNA
tctgtagtttagttgactgcagag

SEQ ID NO: 4563 - RNA, 24 nt, synthetic construct
  source 1..24: mol_type = other RNA
ctgtagtttagttgactgcagagg

SEQ ID NO: 4564 - RNA, 24 nt, synthetic construct
  source 1..24: mol_type = other RNA
tgtagtttagttgactgcagaggg

SEQ ID NO: 4565 - RNA, 24 nt, synthetic construct
  source 1..24: mol_type = other RNA
gtagtttagttgactgcagaggga

SEQ ID NO: 4566 - RNA, 24 nt, synthetic construct
  source 1..24: mol_type = other RNA
tagtttagttgactgcagagggag

SEQ ID NO: 4567 - RNA, 24 nt, synthetic construct
  source 1..24: mol_type = other RNA
agtttagttgactgcagagggagg

SEQ ID NO: 4568 - RNA, 24 nt, synthetic construct
  source 1..24: mol_type = other RNA
gtttagttgactgcagagggaggc

SEQ ID NO: 4569 - RNA, 24 nt, synthetic construct
  source 1..24: mol_type = other RNA
tttagttgactgcagagggaggca

SEQ ID NO: 4570 - RNA, 24 nt, synthetic construct
  source 1..24: mol_type = other RNA
ttagttgactgcagagggaggcag

SEQ ID NO: 4571 - RNA, 25 nt, synthetic construct
  source 1..25: mol_type = other RNA
atgtatttttaaagcaagctgtgtg

SEQ ID NO: 4572 - RNA, 25 nt, synthetic construct
  source 1..25: mol_type = other RNA
tgtatttttaaagcaagctgtgtgg

SEQ ID NO: 4573 - RNA, 25 nt, synthetic construct
  source 1..25: mol_type = other RNA
gtatttttaaagcaagctgtgtgga

SEQ ID NO: 4574 - RNA, 25 nt, synthetic construct
  source 1..25: mol_type = other RNA
tatttttaaagcaagctgtgtggaa

SEQ ID NO: 4575 - RNA, 25 nt, synthetic construct
  source 1..25: mol_type = other RNA
atttttaaagcaagctgtgtggaag

SEQ ID NO: 4576 - RNA, 25 nt, synthetic construct
  source 1..25: mol_type = other RNA
tttttaaagcaagctgtgtggaagg

SEQ ID NO: 4577 - RNA, 25 nt, synthetic construct
  source 1..25: mol_type = other RNA
ttttaaagcaagctgtgtggaagga

SEQ ID NO: 4578 - RNA, 25 nt, synthetic construct
  source 1..25: mol_type = other RNA
tttaaagcaagctgtgtggaaggac

SEQ ID NO: 4579 - RNA, 25 nt, synthetic construct
  source 1..25: mol_type = other RNA
ttaaagcaagctgtgtggaaggaca

SEQ ID NO: 4580 - RNA, 25 nt, synthetic construct
  source 1..25: mol_type = other RNA
taaagcaagctgtgtggaaggacac

SEQ ID NO: 4581 - RNA, 25 nt, synthetic construct
  source 1..25: mol_type = other RNA
aaagcaagctgtgtggaaggacaca

SEQ ID NO: 4582 - RNA, 25 nt, synthetic construct
  source 1..25: mol_type = other RNA
aagcaagctgtgtggaaggacacaa

SEQ ID NO: 4583 - RNA, 25 nt, synthetic construct
  source 1..25: mol_type = other RNA
agcaagctgtgtggaaggacacaat

SEQ ID NO: 4584 - RNA, 25 nt, synthetic construct
  source 1..25: mol_type = other RNA
gcaagctgtgtggaaggacacaatt

SEQ ID NO: 4585 - RNA, 25 nt, synthetic construct
  source 1..25: mol_type = other RNA
caagctgtgtggaaggacacaattt

SEQ ID NO: 4586 - RNA, 25 nt, synthetic construct
  source 1..25: mol_type = other RNA
aagctgtgtggaaggacacaatttc

SEQ ID NO: 4587 - RNA, 25 nt, synthetic construct
  source 1..25: mol_type = other RNA
agctgtgtggaaggacacaatttct

SEQ ID NO: 4588 - RNA, 25 nt, synthetic construct
  source 1..25: mol_type = other RNA
gctgtgtggaaggacacaatttctg

SEQ ID NO: 4589 - RNA, 25 nt, synthetic construct
  source 1..25: mol_type = other RNA
ctgtgtggaaggacacaatttctgt

SEQ ID NO: 4590 - RNA, 25 nt, synthetic construct
  source 1..25: mol_type = other RNA
tgtgtggaaggacacaatttctgta

SEQ ID NO: 4591 - RNA, 25 nt, synthetic construct
  source 1..25: mol_type = other RNA
gtgtggaaggacacaatttctgtag

SEQ ID NO: 4592 - RNA, 25 nt, synthetic construct
  source 1..25: mol_type = other RNA
tgtggaaggacacaatttctgtagt

SEQ ID NO: 4593 - RNA, 25 nt, synthetic construct
  source 1..25: mol_type = other RNA
gtggaaggacacaatttctgtagtt

SEQ ID NO: 4594 - RNA, 25 nt, synthetic construct
  source 1..25: mol_type = other RNA
tggaaggacacaatttctgtagttt

SEQ ID NO: 4595 - RNA, 25 nt, synthetic construct
  source 1..25: mol_type = other RNA
ggaaggacacaatttctgtagttta

SEQ ID NO: 4596 - RNA, 25 nt, synthetic construct
  source 1..25: mol_type = other RNA
gaaggacacaatttctgtagtttag

SEQ ID NO: 4597 - RNA, 25 nt, synthetic construct
  source 1..25: mol_type = other RNA
aaggacacaatttctgtagtttagt

SEQ ID NO: 4598 - RNA, 25 nt, synthetic construct
  source 1..25: mol_type = other RNA
aggacacaatttctgtagtttagtt

SEQ ID NO: 4599 - RNA, 25 nt, synthetic construct
  source 1..25: mol_type = other RNA
ggacacaatttctgtagtttagttg

SEQ ID NO: 4600 - RNA, 25 nt, synthetic construct
  source 1..25: mol_type = other RNA
gacacaatttctgtagtttagttga

SEQ ID NO: 4601 - RNA, 25 nt, synthetic construct
  source 1..25: mol_type = other RNA
acacaatttctgtagtttagttgac

SEQ ID NO: 4602 - RNA, 25 nt, synthetic construct
  source 1..25: mol_type = other RNA
cacaatttctgtagtttagttgact

SEQ ID NO: 4603 - RNA, 25 nt, synthetic construct
  source 1..25: mol_type = other RNA
acaatttctgtagtttagttgactg

SEQ ID NO: 4604 - RNA, 25 nt, synthetic construct
  source 1..25: mol_type = other RNA
caatttctgtagtttagttgactgc

SEQ ID NO: 4605 - RNA, 25 nt, synthetic construct
  source 1..25: mol_type = other RNA
aatttctgtagtttagttgactgca

SEQ ID NO: 4606 - RNA, 25 nt, synthetic construct
  source 1..25: mol_type = other RNA
atttctgtagtttagttgactgcag

SEQ ID NO: 4607 - RNA, 25 nt, synthetic construct
  source 1..25: mol_type = other RNA
tttctgtagtttagttgactgcaga

SEQ ID NO: 4608 - RNA, 25 nt, synthetic construct
  source 1..25: mol_type = other RNA
ttctgtagtttagttgactgcagag

SEQ ID NO: 4609 - RNA, 25 nt, synthetic construct
  source 1..25: mol_type = other RNA
tctgtagtttagttgactgcagagg

SEQ ID NO: 4610 - RNA, 25 nt, synthetic construct
  source 1..25: mol_type = other RNA
ctgtagtttagttgactgcagaggg

SEQ ID NO: 4611 - RNA, 25 nt, synthetic construct
  source 1..25: mol_type = other RNA
tgtagtttagttgactgcagaggga

SEQ ID NO: 4612 - RNA, 25 nt, synthetic construct
  source 1..25: mol_type = other RNA
gtagtttagttgactgcagagggag

SEQ ID NO: 4613 - RNA, 25 nt, synthetic construct
  source 1..25: mol_type = other RNA
tagtttagttgactgcagagggagg

SEQ ID NO: 4614 - RNA, 25 nt, synthetic construct
  source 1..25: mol_type = other RNA
agtttagttgactgcagagggaggc

SEQ ID NO: 4615 - RNA, 25 nt, synthetic construct
  source 1..25: mol_type = other RNA
gtttagttgactgcagagggaggca

SEQ ID NO: 4616 - RNA, 25 nt, synthetic construct
  source 1..25: mol_type = other RNA
tttagttgactgcagagggaggcag

SEQ ID NO: 4617 - RNA, 26 nt, synthetic construct
  source 1..26: mol_type = other RNA
atgtatttttaaagcaagctgtgtgg

SEQ ID NO: 4618 - RNA, 26 nt, synthetic construct
  source 1..26: mol_type = other RNA
tgtatttttaaagcaagctgtgtgga

SEQ ID NO: 4619 - RNA, 26 nt, synthetic construct
  source 1..26: mol_type = other RNA
gtatttttaaagcaagctgtgtggaa

SEQ ID NO: 4620 - RNA, 26 nt, synthetic construct
  source 1..26: mol_type = other RNA
tatttttaaagcaagctgtgtggaag

SEQ ID NO: 4621 - RNA, 26 nt, synthetic construct
  source 1..26: mol_type = other RNA
atttttaaagcaagctgtgtggaagg

SEQ ID NO: 4622 - RNA, 26 nt, synthetic construct
  source 1..26: mol_type = other RNA
tttttaaagcaagctgtgtggaagga

SEQ ID NO: 4623 - RNA, 26 nt, synthetic construct
  source 1..26: mol_type = other RNA
ttttaaagcaagctgtgtggaaggac

SEQ ID NO: 4624 - RNA, 26 nt, synthetic construct
  source 1..26: mol_type = other RNA
tttaaagcaagctgtgtggaaggaca

SEQ ID NO: 4625 - RNA, 26 nt, synthetic construct
  source 1..26: mol_type = other RNA
ttaaagcaagctgtgtggaaggacac

SEQ ID NO: 4626 - RNA, 26 nt, synthetic construct
  source 1..26: mol_type = other RNA
taaagcaagctgtgtggaaggacaca

SEQ ID NO: 4627 - RNA, 26 nt, synthetic construct
  source 1..26: mol_type = other RNA
aaagcaagctgtgtggaaggacacaa

SEQ ID NO: 4628 - RNA, 26 nt, synthetic construct
  source 1..26: mol_type = other RNA
aagcaagctgtgtggaaggacacaat

SEQ ID NO: 4629 - RNA, 26 nt, synthetic construct
  source 1..26: mol_type = other RNA
agcaagctgtgtggaaggacacaatt

SEQ ID NO: 4630 - RNA, 26 nt, synthetic construct
  source 1..26: mol_type = other RNA
gcaagctgtgtggaaggacacaattt

SEQ ID NO: 4631 - RNA, 26 nt, synthetic construct
  source 1..26: mol_type = other RNA
caagctgtgtggaaggacacaatttc

SEQ ID NO: 4632 - RNA, 26 nt, synthetic construct
  source 1..26: mol_type = other RNA
aagctgtgtggaaggacacaatttct

SEQ ID NO: 4633 - RNA, 26 nt, synthetic construct
  source 1..26: mol_type = other RNA
agctgtgtggaaggacacaatttctg

SEQ ID NO: 4634 - RNA, 26 nt, synthetic construct
  source 1..26: mol_type = other RNA
gctgtgtggaaggacacaatttctgt

SEQ ID NO: 4635 - RNA, 26 nt, synthetic construct
  source 1..26: mol_type = other RNA
ctgtgtggaaggacacaatttctgta

SEQ ID NO: 4636 - RNA, 26 nt, synthetic construct
  source 1..26: mol_type = other RNA
tgtgtggaaggacacaatttctgtag

SEQ ID NO: 4637 - RNA, 26 nt, synthetic construct
  source 1..26: mol_type = other RNA
gtgtggaaggacacaatttctgtagt

SEQ ID NO: 4638 - RNA, 26 nt, synthetic construct
  source 1..26: mol_type = other RNA
tgtggaaggacacaatttctgtagtt

SEQ ID NO: 4639 - RNA, 26 nt, synthetic construct
  source 1..26: mol_type = other RNA
gtggaaggacacaatttctgtagttt

SEQ ID NO: 4640 - RNA, 26 nt, synthetic construct
  source 1..26: mol_type = other RNA
tggaaggacacaatttctgtagttta

SEQ ID NO: 4641 - RNA, 26 nt, synthetic construct
  source 1..26: mol_type = other RNA
ggaaggacacaatttctgtagtttag

SEQ ID NO: 4642 - RNA, 26 nt, synthetic construct
  source 1..26: mol_type = other RNA
gaaggacacaatttctgtagtttagt

SEQ ID NO: 4643 - RNA, 26 nt, synthetic construct
  source 1..26: mol_type = other RNA
aaggacacaatttctgtagtttagtt

SEQ ID NO: 4644 - RNA, 26 nt, synthetic construct
  source 1..26: mol_type = other RNA
aggacacaatttctgtagtttagttg

SEQ ID NO: 4645 - RNA, 26 nt, synthetic construct
  source 1..26: mol_type = other RNA
ggacacaatttctgtagtttagttga

SEQ ID NO: 4646 - RNA, 26 nt, synthetic construct
  source 1..26: mol_type = other RNA
gacacaatttctgtagtttagttgac

SEQ ID NO: 4647 - RNA, 26 nt, synthetic construct
  source 1..26: mol_type = other RNA
acacaatttctgtagtttagttgact

SEQ ID NO: 4648 - RNA, 26 nt, synthetic construct
  source 1..26: mol_type = other RNA
cacaatttctgtagtttagttgactg

SEQ ID NO: 4649 - RNA, 26 nt, synthetic construct
  source 1..26: mol_type = other RNA
acaatttctgtagtttagttgactgc

SEQ ID NO: 4650 - RNA, 26 nt, synthetic construct
  source 1..26: mol_type = other RNA
caatttctgtagtttagttgactgca

SEQ ID NO: 4651 - RNA, 26 nt, synthetic construct
  source 1..26: mol_type = other RNA
aatttctgtagtttagttgactgcag

SEQ ID NO: 4652 - RNA, 26 nt, synthetic construct
  source 1..26: mol_type = other RNA
atttctgtagtttagttgactgcaga

SEQ ID NO: 4653 - RNA, 26 nt, synthetic construct
  source 1..26: mol_type = other RNA
tttctgtagtttagttgactgcagag

SEQ ID NO: 4654 - RNA, 26 nt, synthetic construct
  source 1..26: mol_type = other RNA
ttctgtagtttagttgactgcagagg

SEQ ID NO: 4655 - RNA, 26 nt, synthetic construct
  source 1..26: mol_type = other RNA
tctgtagtttagttgactgcagaggg

SEQ ID NO: 4656 - RNA, 26 nt, synthetic construct
  source 1..26: mol_type = other RNA
ctgtagtttagttgactgcagaggga

SEQ ID NO: 4657 - RNA, 26 nt, synthetic construct
  source 1..26: mol_type = other RNA
tgtagtttagttgactgcagagggag

SEQ ID NO: 4658 - RNA, 26 nt, synthetic construct
  source 1..26: mol_type = other RNA
gtagtttagttgactgcagagggagg

SEQ ID NO: 4659 - RNA, 26 nt, synthetic construct
  source 1..26: mol_type = other RNA
tagtttagttgactgcagagggaggc

SEQ ID NO: 4660 - RNA, 26 nt, synthetic construct
  source 1..26: mol_type = other RNA
agtttagttgactgcagagggaggca

SEQ ID NO: 4661 - RNA, 26 nt, synthetic construct
  source 1..26: mol_type = other RNA
gtttagttgactgcagagggaggcag

SEQ ID NO: 4662 - RNA, 18 nt, synthetic construct
  source 1..18: mol_type = other RNA
agctctaccatcctcaac

SEQ ID NO: 4663 - RNA, 19 nt, synthetic construct
  source 1..19: mol_type = other RNA
caggctgacagaagctcta

SEQ ID NO: 4664 - RNA, 19 nt, synthetic construct
  source 1..19: mol_type = other RNA
aggctgacagaagctctac

SEQ ID NO: 4665 - RNA, 19 nt, synthetic construct
  source 1..19: mol_type = other RNA
gacagaagctctaccatcc

SEQ ID NO: 4666 - RNA, 19 nt, synthetic construct
  source 1..19: mol_type = other RNA
acagaagctctaccatcct

SEQ ID NO: 4667 - RNA, 19 nt, synthetic construct
  source 1..19: mol_type = other RNA
agaagctctaccatcctca

SEQ ID NO: 4668 - RNA, 19 nt, synthetic construct
  source 1..19: mol_type = other RNA
aagctctaccatcctcaac

SEQ ID NO: 4669 - RNA, 19 nt, synthetic construct
  source 1..19: mol_type = other RNA
agctctaccatcctcaaca

SEQ ID NO: 4670 - RNA, 19 nt, synthetic construct
  source 1..19: mol_type = other RNA
catgtggcttttaaggtct

SEQ ID NO: 4671 - RNA, 19 nt, synthetic construct
  source 1..19: mol_type = other RNA
tgtggcttttaaggtctcc

SEQ ID NO: 4672 - RNA, 20 nt, synthetic construct
  source 1..20: mol_type = other RNA
cccaggctgacagaagctct

SEQ ID NO: 4673 - RNA, 20 nt, synthetic construct
  source 1..20: mol_type = other RNA
ccaggctgacagaagctcta

SEQ ID NO: 4674 - RNA, 20 nt, synthetic construct
  source 1..20: mol_type = other RNA
caggctgacagaagctctac

SEQ ID NO: 4675 - RNA, 20 nt, synthetic construct
  source 1..20: mol_type = other RNA
ggctgacagaagctctacca

SEQ ID NO: 4676 - RNA, 20 nt, synthetic construct
  source 1..20: mol_type = other RNA
gctgacagaagctctaccat

SEQ ID NO: 4677 - RNA, 20 nt, synthetic construct
  source 1..20: mol_type = other RNA
tgacagaagctctaccatcc

SEQ ID NO: 4678 - RNA, 20 nt, synthetic construct
  source 1..20: mol_type = other RNA
gacagaagctctaccatcct

SEQ ID NO: 4679 - RNA, 20 nt, synthetic construct
  source 1..20: mol_type = other RNA
acagaagctctaccatcctc

SEQ ID NO: 4680 - RNA, 20 nt, synthetic construct
  source 1..20: mol_type = other RNA
cagaagctctaccatcctca

SEQ ID NO: 4681 - RNA, 20 nt, synthetic construct
  source 1..20: mol_type = other RNA
agaagctctaccatcctcaa

SEQ ID NO: 4682 - RNA, 20 nt, synthetic construct
  source 1..20: mol_type = other RNA
aagctctaccatcctcaaca

SEQ ID NO: 4683 - RNA, 20 nt, synthetic construct
  source 1..20: mol_type = other RNA
agctctaccatcctcaacat

SEQ ID NO: 4684 - RNA, 20 nt, synthetic construct
  source 1..20: mol_type = other RNA
gctctaccatcctcaacatg

SEQ ID NO: 4685 - RNA, 20 nt, synthetic construct
  source 1..20: mol_type = other RNA
acatgtggcttttaaggtct

SEQ ID NO: 4686 - RNA, 20 nt, synthetic construct
  source 1..20: mol_type = other RNA
atgtggcttttaaggtctcc

SEQ ID NO: 4687 - RNA, 21 nt, synthetic construct
  source 1..21: mol_type = other RNA
cagagacccaggctgacagaa

SEQ ID NO: 4688 - RNA, 21 nt, synthetic construct
  source 1..21: mol_type = other RNA
agagacccaggctgacagaag

SEQ ID NO: 4689 - RNA, 21 nt, synthetic construct
  source 1..21: mol_type = other RNA
gagacccaggctgacagaagc

SEQ ID NO: 4690 - RNA, 21 nt, synthetic construct
  source 1..21: mol_type = other RNA
acccaggctgacagaagctct

SEQ ID NO: 4691 - RNA, 21 nt, synthetic construct
  source 1..21: mol_type = other RNA
cccaggctgacagaagctcta

SEQ ID NO: 4692 - RNA, 21 nt, synthetic construct
  source 1..21: mol_type = other RNA
ccaggctgacagaagctctac

SEQ ID NO: 4693 - RNA, 21 nt, synthetic construct
  source 1..21: mol_type = other RNA
caggctgacagaagctctacc

SEQ ID NO: 4694 - RNA, 21 nt, synthetic construct
  source 1..21: mol_type = other RNA
aggctgacagaagctctacca

SEQ ID NO: 4695 - RNA, 21 nt, synthetic construct
  source 1..21: mol_type = other RNA
ggctgacagaagctctaccat

SEQ ID NO: 4696 - RNA, 21 nt, synthetic construct
  source 1..21: mol_type = other RNA
gctgacagaagctctaccatc

SEQ ID NO: 4697 - RNA, 21 nt, synthetic construct
  source 1..21: mol_type = other RNA
ctgacagaagctctaccatcc

SEQ ID NO: 4698 - RNA, 21 nt, synthetic construct
  source 1..21: mol_type = other RNA
tgacagaagctctaccatcct

SEQ ID NO: 4699 - RNA, 21 nt, synthetic construct
  source 1..21: mol_type = other RNA
gacagaagctctaccatcctc

SEQ ID NO: 4700 - RNA, 21 nt, synthetic construct
  source 1..21: mol_type = other RNA
acagaagctctaccatcctca

SEQ ID NO: 4701 - RNA, 21 nt, synthetic construct
  source 1..21: mol_type = other RNA
cagaagctctaccatcctcaa

SEQ ID NO: 4702 - RNA, 21 nt, synthetic construct
  source 1..21: mol_type = other RNA
agaagctctaccatcctcaac

SEQ ID NO: 4703 - RNA, 21 nt, synthetic construct
  source 1..21: mol_type = other RNA
gaagctctaccatcctcaaca

SEQ ID NO: 4704 - RNA, 21 nt, synthetic construct
  source 1..21: mol_type = other RNA
aagctctaccatcctcaacat

SEQ ID NO: 4705 - RNA, 21 nt, synthetic construct
  source 1..21: mol_type = other RNA
agctctaccatcctcaacatg

SEQ ID NO: 4706 - RNA, 21 nt, synthetic construct
  source 1..21: mol_type = other RNA
gctctaccatcctcaacatgt

SEQ ID NO: 4707 - RNA, 21 nt, synthetic construct
  source 1..21: mol_type = other RNA
tcctcaacatgtggcttttaa

SEQ ID NO: 4708 - RNA, 21 nt, synthetic construct
  source 1..21: mol_type = other RNA
cctcaacatgtggcttttaag

SEQ ID NO: 4709 - RNA, 21 nt, synthetic construct
  source 1..21: mol_type = other RNA
aacatgtggcttttaaggtct

SEQ ID NO: 4710 - RNA, 21 nt, synthetic construct
  source 1..21: mol_type = other RNA
acatgtggcttttaaggtctc

SEQ ID NO: 4711 - RNA, 21 nt, synthetic construct
  source 1..21: mol_type = other RNA
catgtggcttttaaggtctcc

SEQ ID NO: 4712 - RNA, 22 nt, synthetic construct
  source 1..22: mol_type = other RNA
ttcagagacccaggctgacaga

SEQ ID NO: 4713 - RNA, 22 nt, synthetic construct
  source 1..22: mol_type = other RNA
tcagagacccaggctgacagaa

SEQ ID NO: 4714 - RNA, 22 nt, synthetic construct
  source 1..22: mol_type = other RNA
cagagacccaggctgacagaag

SEQ ID NO: 4715 - RNA, 22 nt, synthetic construct
  source 1..22: mol_type = other RNA
agagacccaggctgacagaagc

SEQ ID NO: 4716 - RNA, 22 nt, synthetic construct
  source 1..22: mol_type = other RNA
gagacccaggctgacagaagct

SEQ ID NO: 4717 - RNA, 22 nt, synthetic construct
  source 1..22: mol_type = other RNA
agacccaggctgacagaagctc

SEQ ID NO: 4718 - RNA, 22 nt, synthetic construct
  source 1..22: mol_type = other RNA
gacccaggctgacagaagctct

SEQ ID NO: 4719 - RNA, 22 nt, synthetic construct
  source 1..22: mol_type = other RNA
acccaggctgacagaagctcta

SEQ ID NO: 4720 - RNA, 22 nt, synthetic construct
  source 1..22: mol_type = other RNA
cccaggctgacagaagctctac

SEQ ID NO: 4721 - RNA, 22 nt, synthetic construct
  source 1..22: mol_type = other RNA
ccaggctgacagaagctctacc

SEQ ID NO: 4722 - RNA, 22 nt, synthetic construct
  source 1..22: mol_type = other RNA
caggctgacagaagctctacca

SEQ ID NO: 4723 - RNA, 22 nt, synthetic construct
  source 1..22: mol_type = other RNA
aggctgacagaagctctaccat

SEQ ID NO: 4724 - RNA, 22 nt, synthetic construct
  source 1..22: mol_type = other RNA
ggctgacagaagctctaccatc

SEQ ID NO: 4725 - RNA, 22 nt, synthetic construct
  source 1..22: mol_type = other RNA
gctgacagaagctctaccatcc

SEQ ID NO: 4726 - RNA, 22 nt, synthetic construct
  source 1..22: mol_type = other RNA
ctgacagaagctctaccatcct

SEQ ID NO: 4727 - RNA, 22 nt, synthetic construct
  source 1..22: mol_type = other RNA
tgacagaagctctaccatcctc

SEQ ID NO: 4728 - RNA, 22 nt, synthetic construct
  source 1..22: mol_type = other RNA
gacagaagctctaccatcctca

SEQ ID NO: 4729 - RNA, 22 nt, synthetic construct
  source 1..22: mol_type = other RNA
acagaagctctaccatcctcaa

SEQ ID NO: 4730 - RNA, 22 nt, synthetic construct
  source 1..22: mol_type = other RNA
cagaagctctaccatcctcaac

SEQ ID NO: 4731 - RNA, 22 nt, synthetic construct
  source 1..22: mol_type = other RNA
agaagctctaccatcctcaaca

SEQ ID NO: 4732 - RNA, 22 nt, synthetic construct
  source 1..22: mol_type = other RNA
gaagctctaccatcctcaacat

SEQ ID NO: 4733 - RNA, 22 nt, synthetic construct
  source 1..22: mol_type = other RNA
aagctctaccatcctcaacatg

SEQ ID NO: 4734 - RNA, 22 nt, synthetic construct
  source 1..22: mol_type = other RNA
agctctaccatcctcaacatgt

SEQ ID NO: 4735 - RNA, 22 nt, synthetic construct
  source 1..22: mol_type = other RNA
gctctaccatcctcaacatgtg

SEQ ID NO: 4736 - RNA, 22 nt, synthetic construct
  source 1..22: mol_type = other RNA
atcctcaacatgtggcttttaa

SEQ ID NO: 4737 - RNA, 22 nt, synthetic construct
  source 1..22: mol_type = other RNA
tcctcaacatgtggcttttaag

SEQ ID NO: 4738 - RNA, 22 nt, synthetic construct
  source 1..22: mol_type = other RNA
cctcaacatgtggcttttaagg

SEQ ID NO: 4739 - RNA, 22 nt, synthetic construct
  source 1..22: mol_type = other RNA
caacatgtggcttttaaggtct

SEQ ID NO: 4740 - RNA, 22 nt, synthetic construct
  source 1..22: mol_type = other RNA
aacatgtggcttttaaggtctc

SEQ ID NO: 4741 - RNA, 22 nt, synthetic construct
  source 1..22: mol_type = other RNA
acatgtggcttttaaggtctcc

SEQ ID NO: 4742 - RNA, 23 nt, synthetic construct
  source 1..23: mol_type = other RNA
gtcattcagagacccaggctgac

SEQ ID NO: 4743 - RNA, 23 nt, synthetic construct
  source 1..23: mol_type = other RNA
attcagagacccaggctgacaga

SEQ ID NO: 4744 - RNA, 23 nt, synthetic construct
  source 1..23: mol_type = other RNA
ttcagagacccaggctgacagaa

SEQ ID NO: 4745 - RNA, 23 nt, synthetic construct
  source 1..23: mol_type = other RNA
tcagagacccaggctgacagaag

SEQ ID NO: 4746 - RNA, 23 nt, synthetic construct
  source 1..23: mol_type = other RNA
cagagacccaggctgacagaagc

SEQ ID NO: 4747 - RNA, 23 nt, synthetic construct
  source 1..23: mol_type = other RNA
agagacccaggctgacagaagct

SEQ ID NO: 4748 - RNA, 23 nt, synthetic construct
  source 1..23: mol_type = other RNA
gagacccaggctgacagaagctc

SEQ ID NO: 4749 - RNA, 23 nt, synthetic construct
  source 1..23: mol_type = other RNA
agacccaggctgacagaagctct

SEQ ID NO: 4750 - RNA, 23 nt, synthetic construct
  source 1..23: mol_type = other RNA
gacccaggctgacagaagctcta

SEQ ID NO: 4751 - RNA, 23 nt, synthetic construct
  source 1..23: mol_type = other RNA
acccaggctgacagaagctctac

SEQ ID NO: 4752 - RNA, 23 nt, synthetic construct
  source 1..23: mol_type = other RNA
cccaggctgacagaagctctacc

SEQ ID NO: 4753 - RNA, 23 nt, synthetic construct
  source 1..23: mol_type = other RNA
ccaggctgacagaagctctacca

SEQ ID NO: 4754 - RNA, 23 nt, synthetic construct
  source 1..23: mol_type = other RNA
caggctgacagaagctctaccat

SEQ ID NO: 4755 - RNA, 23 nt, synthetic construct
  source 1..23: mol_type = other RNA
aggctgacagaagctctaccatc

SEQ ID NO: 4756 - RNA, 23 nt, synthetic construct
  source 1..23: mol_type = other RNA
ggctgacagaagctctaccatcc

SEQ ID NO: 4757 - RNA, 23 nt, synthetic construct
  source 1..23: mol_type = other RNA
gctgacagaagctctaccatcct

SEQ ID NO: 4758 - RNA, 23 nt, synthetic construct
  source 1..23: mol_type = other RNA
ctgacagaagctctaccatcctc

SEQ ID NO: 4759 - RNA, 23 nt, synthetic construct
  source 1..23: mol_type = other RNA
tgacagaagctctaccatcctca

SEQ ID NO: 4760 - RNA, 23 nt, synthetic construct
  source 1..23: mol_type = other RNA
gacagaagctctaccatcctcaa

SEQ ID NO: 4761 - RNA, 23 nt, synthetic construct
  source 1..23: mol_type = other RNA
acagaagctctaccatcctcaac

SEQ ID NO: 4762 - RNA, 23 nt, synthetic construct
  source 1..23: mol_type = other RNA
cagaagctctaccatcctcaaca

SEQ ID NO: 4763 - RNA, 23 nt, synthetic construct
  source 1..23: mol_type = other RNA
agaagctctaccatcctcaacat

SEQ ID NO: 4764 - RNA, 23 nt, synthetic construct
  source 1..23: mol_type = other RNA
gaagctctaccatcctcaacatg

SEQ ID NO: 4765 - RNA, 23 nt, synthetic construct
  source 1..23: mol_type = other RNA
aagctctaccatcctcaacatgt

SEQ ID NO: 4766 - RNA, 23 nt, synthetic construct
  source 1..23: mol_type = other RNA
agctctaccatcctcaacatgtg

SEQ ID NO: 4767 - RNA, 23 nt, synthetic construct
  source 1..23: mol_type = other RNA
gctctaccatcctcaacatgtgg

SEQ ID NO: 4768 - RNA, 23 nt, synthetic construct
  source 1..23: mol_type = other RNA
catcctcaacatgtggcttttaa

SEQ ID NO: 4769 - RNA, 23 nt, synthetic construct
  source 1..23: mol_type = other RNA
atcctcaacatgtggcttttaag

SEQ ID NO: 4770 - RNA, 23 nt, synthetic construct
  source 1..23: mol_type = other RNA
tcctcaacatgtggcttttaagg

SEQ ID NO: 4771 - RNA, 23 nt, synthetic construct
  source 1..23: mol_type = other RNA
cctcaacatgtggcttttaaggt

SEQ ID NO: 4772 - RNA, 23 nt, synthetic construct
  source 1..23: mol_type = other RNA
tcaacatgtggcttttaaggtct

SEQ ID NO: 4773 - RNA, 23 nt, synthetic construct
  source 1..23: mol_type = other RNA
caacatgtggcttttaaggtctc

SEQ ID NO: 4774 - RNA, 23 nt, synthetic construct
  source 1..23: mol_type = other RNA
aacatgtggcttttaaggtctcc

SEQ ID NO: 4775 - RNA, 24 nt, synthetic construct
  source 1..24: mol_type = other RNA
tgcagtcattcagagacccaggct

SEQ ID NO: 4776 - RNA, 24 nt, synthetic construct
  source 1..24: mol_type = other RNA
gcagtcattcagagacccaggctg

SEQ ID NO: 4777 - RNA, 24 nt, synthetic construct
  source 1..24: mol_type = other RNA
agtcattcagagacccaggctgac

SEQ ID NO: 4778 - RNA, 24 nt, synthetic construct
  source 1..24: mol_type = other RNA
gtcattcagagacccaggctgaca

SEQ ID NO: 4779 - RNA, 24 nt, synthetic construct
  source 1..24: mol_type = other RNA
cattcagagacccaggctgacaga

SEQ ID NO: 4780 - RNA, 24 nt, synthetic construct
  source 1..24: mol_type = other RNA
attcagagacccaggctgacagaa

SEQ ID NO: 4781 - RNA, 24 nt, synthetic construct
  source 1..24: mol_type = other RNA
ttcagagacccaggctgacagaag

SEQ ID NO: 4782 - RNA, 24 nt, synthetic construct
  source 1..24: mol_type = other RNA
tcagagacccaggctgacagaagc

SEQ ID NO: 4783 - RNA, 24 nt, synthetic construct
  source 1..24: mol_type = other RNA
cagagacccaggctgacagaagct

SEQ ID NO: 4784 - RNA, 24 nt, synthetic construct
  source 1..24: mol_type = other RNA
agagacccaggctgacagaagctc

SEQ ID NO: 4785 - RNA, 24 nt, synthetic construct
  source 1..24: mol_type = other RNA
gagacccaggctgacagaagctct

SEQ ID NO: 4786 - RNA, 24 nt, synthetic construct
  source 1..24: mol_type = other RNA
agacccaggctgacagaagctcta

SEQ ID NO: 4787 - RNA, 24 nt, synthetic construct
  source 1..24: mol_type = other RNA
gacccaggctgacagaagctctac

SEQ ID NO: 4788 - RNA, 24 nt, synthetic construct
  source 1..24: mol_type = other RNA
acccaggctgacagaagctctacc

SEQ ID NO: 4789 - RNA, 24 nt, synthetic construct
  source 1..24: mol_type = other RNA
cccaggctgacagaagctctacca

SEQ ID NO: 4790 - RNA, 24 nt, synthetic construct
  source 1..24: mol_type = other RNA
ccaggctgacagaagctctaccat

SEQ ID NO: 4791 - RNA, 24 nt, synthetic construct
  source 1..24: mol_type = other RNA
caggctgacagaagctctaccatc

SEQ ID NO: 4792 - RNA, 24 nt, synthetic construct
  source 1..24: mol_type = other RNA
aggctgacagaagctctaccatcc

SEQ ID NO: 4793 - RNA, 24 nt, synthetic construct
  source 1..24: mol_type = other RNA
ggctgacagaagctctaccatcct

SEQ ID NO: 4794 - RNA, 24 nt, synthetic construct
  source 1..24: mol_type = other RNA
gctgacagaagctctaccatcctc

SEQ ID NO: 4795 - RNA, 24 nt, synthetic construct
  source 1..24: mol_type = other RNA
ctgacagaagctctaccatcctca

SEQ ID NO: 4796 - RNA, 24 nt, synthetic construct
  source 1..24: mol_type = other RNA
tgacagaagctctaccatcctcaa

SEQ ID NO: 4797 - RNA, 24 nt, synthetic construct
  source 1..24: mol_type = other RNA
gacagaagctctaccatcctcaac

SEQ ID NO: 4798 - RNA, 24 nt, synthetic construct
  source 1..24: mol_type = other RNA
acagaagctctaccatcctcaaca

SEQ ID NO: 4799 - RNA, 24 nt, synthetic construct
  source 1..24: mol_type = other RNA
cagaagctctaccatcctcaacat

SEQ ID NO: 4800 - RNA, 24 nt, synthetic construct
  source 1..24: mol_type = other RNA
agaagctctaccatcctcaacatg

SEQ ID NO: 4801 - RNA, 24 nt, synthetic construct
  source 1..24: mol_type = other RNA
gaagctctaccatcctcaacatgt

SEQ ID NO: 4802 - RNA, 24 nt, synthetic construct
  source 1..24: mol_type = other RNA
aagctctaccatcctcaacatgtg

SEQ ID NO: 4803 - RNA, 24 nt, synthetic construct
  source 1..24: mol_type = other RNA
agctctaccatcctcaacatgtgg

SEQ ID NO: 4804 - RNA, 24 nt, synthetic construct
  source 1..24: mol_type = other RNA
gctctaccatcctcaacatgtggc

SEQ ID NO: 4805 - RNA, 24 nt, synthetic construct
  source 1..24: mol_type = other RNA
accatcctcaacatgtggctttta

SEQ ID NO: 4806 - RNA, 24 nt, synthetic construct
  source 1..24: mol_type = other RNA
ccatcctcaacatgtggcttttaa

SEQ ID NO: 4807 - RNA, 24 nt, synthetic construct
  source 1..24: mol_type = other RNA
catcctcaacatgtggcttttaag

SEQ ID NO: 4808 - RNA, 24 nt, synthetic construct
  source 1..24: mol_type = other RNA
atcctcaacatgtggcttttaagg

SEQ ID NO: 4809 - RNA, 24 nt, synthetic construct
  source 1..24: mol_type = other RNA
tcctcaacatgtggcttttaaggt

SEQ ID NO: 4810 - RNA, 24 nt, synthetic construct
  source 1..24: mol_type = other RNA
cctcaacatgtggcttttaaggtc

SEQ ID NO: 4811 - RNA, 24 nt, synthetic construct
  source 1..24: mol_type = other RNA
ctcaacatgtggcttttaaggtct

SEQ ID NO: 4812 - RNA, 24 nt, synthetic construct
  source 1..24: mol_type = other RNA
tcaacatgtggcttttaaggtctc

SEQ ID NO: 4813 - RNA, 24 nt, synthetic construct
  source 1..24: mol_type = other RNA
caacatgtggcttttaaggtctcc

SEQ ID NO: 4814 - RNA, 25 nt, synthetic construct
  source 1..25: mol_type = other RNA
atgcagtcattcagagacccaggct

SEQ ID NO: 4815 - RNA, 25 nt, synthetic construct
  source 1..25: mol_type = other RNA
tgcagtcattcagagacccaggctg

SEQ ID NO: 4816 - RNA, 25 nt, synthetic construct
  source 1..25: mol_type = other RNA
gcagtcattcagagacccaggctga

SEQ ID NO: 4817 - RNA, 25 nt, synthetic construct
  source 1..25: mol_type = other RNA
cagtcattcagagacccaggctgac

SEQ ID NO: 4818 - RNA, 25 nt, synthetic construct
  source 1..25: mol_type = other RNA
agtcattcagagacccaggctgaca

SEQ ID NO: 4819 - RNA, 25 nt, synthetic construct
  source 1..25: mol_type = other RNA
gtcattcagagacccaggctgacag

SEQ ID NO: 4820 - RNA, 25 nt, synthetic construct
  source 1..25: mol_type = other RNA
tcattcagagacccaggctgacaga

SEQ ID NO: 4821 - RNA, 25 nt, synthetic construct
  source 1..25: mol_type = other RNA
cattcagagacccaggctgacagaa

SEQ ID NO: 4822 - RNA, 25 nt, synthetic construct
  source 1..25: mol_type = other RNA
attcagagacccaggctgacagaag

SEQ ID NO: 4823 - RNA, 25 nt, synthetic construct
  source 1..25: mol_type = other RNA
ttcagagacccaggctgacagaagc

SEQ ID NO: 4824 - RNA, 25 nt, synthetic construct
  source 1..25: mol_type = other RNA
tcagagacccaggctgacagaagct

SEQ ID NO: 4825 - RNA, 25 nt, synthetic construct
  source 1..25: mol_type = other RNA
cagagacccaggctgacagaagctc

SEQ ID NO: 4826 - RNA, 25 nt, synthetic construct
  source 1..25: mol_type = other RNA
agagacccaggctgacagaagctct

SEQ ID NO: 4827 - RNA, 25 nt, synthetic construct
  source 1..25: mol_type = other RNA
gagacccaggctgacagaagctcta

SEQ ID NO: 4828 - RNA, 25 nt, synthetic construct
  source 1..25: mol_type = other RNA
agacccaggctgacagaagctctac

SEQ ID NO: 4829 - RNA, 25 nt, synthetic construct
  source 1..25: mol_type = other RNA
gacccaggctgacagaagctctacc

SEQ ID NO: 4830 - RNA, 25 nt, synthetic construct
  source 1..25: mol_type = other RNA
acccaggctgacagaagctctacca

SEQ ID NO: 4831 - RNA, 25 nt, synthetic construct
  source 1..25: mol_type = other RNA
cccaggctgacagaagctctaccat

SEQ ID NO: 4832 - RNA, 25 nt, synthetic construct
  source 1..25: mol_type = other RNA
ccaggctgacagaagctctaccatc

SEQ ID NO: 4833 - RNA, 25 nt, synthetic construct
  source 1..25: mol_type = other RNA
caggctgacagaagctctaccatcc

SEQ ID NO: 4834 - RNA, 25 nt, synthetic construct
  source 1..25: mol_type = other RNA
aggctgacagaagctctaccatcct

SEQ ID NO: 4835 - RNA, 25 nt, synthetic construct
  source 1..25: mol_type = other RNA
ggctgacagaagctctaccatcctc

SEQ ID NO: 4836 - RNA, 25 nt, synthetic construct
  source 1..25: mol_type = other RNA
gctgacagaagctctaccatcctca

SEQ ID NO: 4837 - RNA, 25 nt, synthetic construct
  source 1..25: mol_type = other RNA
ctgacagaagctctaccatcctcaa

SEQ ID NO: 4838 - RNA, 25 nt, synthetic construct
  source 1..25: mol_type = other RNA
tgacagaagctctaccatcctcaac

SEQ ID NO: 4839 - RNA, 25 nt, synthetic construct
  source 1..25: mol_type = other RNA
gacagaagctctaccatcctcaaca

SEQ ID NO: 4840 - RNA, 25 nt, synthetic construct
  source 1..25: mol_type = other RNA
acagaagctctaccatcctcaacat

SEQ ID NO: 4841 - RNA, 25 nt, synthetic construct
  source 1..25: mol_type = other RNA
cagaagctctaccatcctcaacatg

SEQ ID NO: 4842 - RNA, 25 nt, synthetic construct
  source 1..25: mol_type = other RNA
agaagctctaccatcctcaacatgt

SEQ ID NO: 4843 - RNA, 25 nt, synthetic construct
  source 1..25: mol_type = other RNA
gaagctctaccatcctcaacatgtg

SEQ ID NO: 4844 - RNA, 25 nt, synthetic construct
  source 1..25: mol_type = other RNA
aagctctaccatcctcaacatgtgg

SEQ ID NO: 4845 - RNA, 25 nt, synthetic construct
  source 1..25: mol_type = other RNA
agctctaccatcctcaacatgtggc

SEQ ID NO: 4846 - RNA, 25 nt, synthetic construct
  source 1..25: mol_type = other RNA
gctctaccatcctcaacatgtggct

SEQ ID NO: 4847 - RNA, 25 nt, synthetic construct
  source 1..25: mol_type = other RNA
taccatcctcaacatgtggctttta

SEQ ID NO: 4848 - RNA, 25 nt, synthetic construct
  source 1..25: mol_type = other RNA
accatcctcaacatgtggcttttaa

SEQ ID NO: 4849 - RNA, 25 nt, synthetic construct
  source 1..25: mol_type = other RNA
ccatcctcaacatgtggcttttaag

SEQ ID NO: 4850 - RNA, 25 nt, synthetic construct
  source 1..25: mol_type = other RNA
catcctcaacatgtggcttttaagg

SEQ ID NO: 4851 - RNA, 25 nt, synthetic construct
  source 1..25: mol_type = other RNA
atcctcaacatgtggcttttaaggt

SEQ ID NO: 4852 - RNA, 25 nt, synthetic construct
  source 1..25: mol_type = other RNA
tcctcaacatgtggcttttaaggtc

SEQ ID NO: 4853 - RNA, 25 nt, synthetic construct
  source 1..25: mol_type = other RNA
cctcaacatgtggcttttaaggtct

SEQ ID NO: 4854 - RNA, 25 nt, synthetic construct
  source 1..25: mol_type = other RNA
ctcaacatgtggcttttaaggtctc

SEQ ID NO: 4855 - RNA, 25 nt, synthetic construct
  source 1..25: mol_type = other RNA
tcaacatgtggcttttaaggtctcc

SEQ ID NO: 4856 - RNA, 26 nt, synthetic construct
  source 1..26: mol_type = other RNA
catgcagtcattcagagacccaggct

SEQ ID NO: 4857 - RNA, 26 nt, synthetic construct
  source 1..26: mol_type = other RNA
atgcagtcattcagagacccaggctg

SEQ ID NO: 4858 - RNA, 26 nt, synthetic construct
  source 1..26: mol_type = other RNA
tgcagtcattcagagacccaggctga

SEQ ID NO: 4859 - RNA, 26 nt, synthetic construct
  source 1..26: mol_type = other RNA
gcagtcattcagagacccaggctgac

SEQ ID NO: 4860 - RNA, 26 nt, synthetic construct
  source 1..26: mol_type = other RNA
cagtcattcagagacccaggctgaca

SEQ ID NO: 4861 - RNA, 26 nt, synthetic construct
  source 1..26: mol_type = other RNA
agtcattcagagacccaggctgacag

SEQ ID NO: 4862 - RNA, 26 nt, synthetic construct
  source 1..26: mol_type = other RNA
gtcattcagagacccaggctgacaga

SEQ ID NO: 4863 - RNA, 26 nt, synthetic construct
  source 1..26: mol_type = other RNA
tcattcagagacccaggctgacagaa

SEQ ID NO: 4864 - RNA, 26 nt, synthetic construct
  source 1..26: mol_type = other RNA
cattcagagacccaggctgacagaag

SEQ ID NO: 4865 - RNA, 26 nt, synthetic construct
  source 1..26: mol_type = other RNA
attcagagacccaggctgacagaagc

SEQ ID NO: 4866 - RNA, 26 nt, synthetic construct
  source 1..26: mol_type = other RNA
ttcagagacccaggctgacagaagct

SEQ ID NO: 4867 - RNA, 26 nt, synthetic construct
  source 1..26: mol_type = other RNA
tcagagacccaggctgacagaagctc

SEQ ID NO: 4868 - RNA, 26 nt, synthetic construct
  source 1..26: mol_type = other RNA
cagagacccaggctgacagaagctct

SEQ ID NO: 4869 - RNA, 26 nt, synthetic construct
  source 1..26: mol_type = other RNA
agagacccaggctgacagaagctcta

SEQ ID NO: 4870 - RNA, 26 nt, synthetic construct
  source 1..26: mol_type = other RNA
gagacccaggctgacagaagctctac

SEQ ID NO: 4871 - RNA, 26 nt, synthetic construct
  source 1..26: mol_type = other RNA
agacccaggctgacagaagctctacc

SEQ ID NO: 4872 - RNA, 26 nt, synthetic construct
  source 1..26: mol_type = other RNA
gacccaggctgacagaagctctacca

SEQ ID NO: 4873 - RNA, 26 nt, synthetic construct
  source 1..26: mol_type = other RNA
acccaggctgacagaagctctaccat

SEQ ID NO: 4874 - RNA, 26 nt, synthetic construct
  source 1..26: mol_type = other RNA
cccaggctgacagaagctctaccatc

SEQ ID NO: 4875 - RNA, 26 nt, synthetic construct
  source 1..26: mol_type = other RNA
ccaggctgacagaagctctaccatcc

SEQ ID NO: 4876 - RNA, 26 nt, synthetic construct
  source 1..26: mol_type = other RNA
caggctgacagaagctctaccatcct

SEQ ID NO: 4877 - RNA, 26 nt, synthetic construct
  source 1..26: mol_type = other RNA
aggctgacagaagctctaccatcctc

SEQ ID NO: 4878 - RNA, 26 nt, synthetic construct
  source 1..26: mol_type = other RNA
ggctgacagaagctctaccatcctca

SEQ ID NO: 4879 - RNA, 26 nt, synthetic construct
  source 1..26: mol_type = other RNA
gctgacagaagctctaccatcctcaa

SEQ ID NO: 4880 - RNA, 26 nt, synthetic construct
  source 1..26: mol_type = other RNA
ctgacagaagctctaccatcctcaac

SEQ ID NO: 4881 - RNA, 26 nt, synthetic construct
  source 1..26: mol_type = other RNA
tgacagaagctctaccatcctcaaca

SEQ ID NO: 4882 - RNA, 26 nt, synthetic construct
  source 1..26: mol_type = other RNA
gacagaagctctaccatcctcaacat

SEQ ID NO: 4883 - RNA, 26 nt, synthetic construct
  source 1..26: mol_type = other RNA
acagaagctctaccatcctcaacatg

SEQ ID NO: 4884 - RNA, 26 nt, synthetic construct
  source 1..26: mol_type = other RNA
cagaagctctaccatcctcaacatgt

SEQ ID NO: 4885 - RNA, 26 nt, synthetic construct
  source 1..26: mol_type = other RNA
agaagctctaccatcctcaacatgtg

SEQ ID NO: 4886 - RNA, 26 nt, synthetic construct
  source 1..26: mol_type = other RNA
gaagctctaccatcctcaacatgtgg

SEQ ID NO: 4887 - RNA, 26 nt, synthetic construct
  source 1..26: mol_type = other RNA
aagctctaccatcctcaacatgtggc

SEQ ID NO: 4888 - RNA, 26 nt, synthetic construct
  source 1..26: mol_type = other RNA
agctctaccatcctcaacatgtggct

SEQ ID NO: 4889 - RNA, 26 nt, synthetic construct
  source 1..26: mol_type = other RNA
gctctaccatcctcaacatgtggctt

SEQ ID NO: 4890 - RNA, 26 nt, synthetic construct
  source 1..26: mol_type = other RNA
ctaccatcctcaacatgtggctttta

SEQ ID NO: 4891 - RNA, 26 nt, synthetic construct
  source 1..26: mol_type = other RNA
taccatcctcaacatgtggcttttaa

SEQ ID NO: 4892 - RNA, 26 nt, synthetic construct
  source 1..26: mol_type = other RNA
accatcctcaacatgtggcttttaag

SEQ ID NO: 4893 - RNA, 26 nt, synthetic construct
  source 1..26: mol_type = other RNA
ccatcctcaacatgtggcttttaagg

SEQ ID NO: 4894 - RNA, 26 nt, synthetic construct
  source 1..26: mol_type = other RNA
catcctcaacatgtggcttttaaggt

SEQ ID NO: 4895 - RNA, 26 nt, synthetic construct
  source 1..26: mol_type = other RNA
atcctcaacatgtggcttttaaggtc

SEQ ID NO: 4896 - RNA, 26 nt, synthetic construct
  source 1..26: mol_type = other RNA
tcctcaacatgtggcttttaaggtct

SEQ ID NO: 4897 - RNA, 26 nt, synthetic construct
  source 1..26: mol_type = other RNA
cctcaacatgtggcttttaaggtctc

SEQ ID NO: 4898 - RNA, 26 nt, synthetic construct
  source 1..26: mol_type = other RNA
ctcaacatgtggcttttaaggtctcc

SEQ ID NO: 4899 - RNA, 18 nt, synthetic construct
  source 1..18: mol_type = other RNA
ggctctgaaagtgtgact

SEQ ID NO: 4900 - RNA, 18 nt, synthetic construct
  source 1..18: mol_type = other RNA
ctctgaaagtgtgactac

SEQ ID NO: 4901 - RNA, 18 nt, synthetic construct
  source 1..18: mol_type = other RNA
tctgaaagtgtgactact

SEQ ID NO: 4902 - RNA, 18 nt, synthetic construct
  source 1..18: mol_type = other RNA
ctgaaagtgtgactactg

SEQ ID NO: 4903 - RNA, 18 nt, synthetic construct
  source 1..18: mol_type = other RNA
aagtgtgactactggacc

SEQ ID NO: 4904 - RNA, 18 nt, synthetic construct
  source 1..18: mol_type = other RNA
gtgtgactactggaccag

SEQ ID NO: 4905 - RNA, 18 nt, synthetic construct
  source 1..18: mol_type = other RNA
tgactactggaccagcag

SEQ ID NO: 4906 - RNA, 18 nt, synthetic construct
  source 1..18: mol_type = other RNA
actactggaccagcagca

SEQ ID NO: 4907 - RNA, 19 nt, synthetic construct
  source 1..19: mol_type = other RNA
gccatgagctcacagggca

SEQ ID NO: 4908 - RNA, 19 nt, synthetic construct
  source 1..19: mol_type = other RNA
ccatgagctcacagggcag

SEQ ID NO: 4909 - RNA, 19 nt, synthetic construct
  source 1..19: mol_type = other RNA
catgagctcacagggcagt

SEQ ID NO: 4910 - RNA, 19 nt, synthetic construct
  source 1..19: mol_type = other RNA
atgagctcacagggcagtg

SEQ ID NO: 4911 - RNA, 19 nt, synthetic construct
  source 1..19: mol_type = other RNA
gtggctctgaaagtgtgac

SEQ ID NO: 4912 - RNA, 19 nt, synthetic construct
  source 1..19: mol_type = other RNA
tggctctgaaagtgtgact

SEQ ID NO: 4913 - RNA, 19 nt, synthetic construct
  source 1..19: mol_type = other RNA
ggctctgaaagtgtgacta

SEQ ID NO: 4914 - RNA, 19 nt, synthetic construct
  source 1..19: mol_type = other RNA
gctctgaaagtgtgactac

SEQ ID NO: 4915 - RNA, 19 nt, synthetic construct
  source 1..19: mol_type = other RNA
ctctgaaagtgtgactact

SEQ ID NO: 4916 - RNA, 19 nt, synthetic construct
  source 1..19: mol_type = other RNA
tctgaaagtgtgactactg

SEQ ID NO: 4917 - RNA, 19 nt, synthetic construct
  source 1..19: mol_type = other RNA
ctgaaagtgtgactactgg

SEQ ID NO: 4918 - RNA, 19 nt, synthetic construct
  source 1..19: mol_type = other RNA
gaaagtgtgactactggac

SEQ ID NO: 4919 - RNA, 19 nt, synthetic construct
  source 1..19: mol_type = other RNA
aaagtgtgactactggacc

SEQ ID NO: 4920 - RNA, 19 nt, synthetic construct
  source 1..19: mol_type = other RNA
aagtgtgactactggacca

SEQ ID NO: 4921 - RNA, 19 nt, synthetic construct
  source 1..19: mol_type = other RNA
agtgtgactactggaccag

SEQ ID NO: 4922 - RNA, 19 nt, synthetic construct
  source 1..19: mol_type = other RNA
gtgtgactactggaccagc

SEQ ID NO: 4923 - RNA, 19 nt, synthetic construct
  source 1..19: mol_type = other RNA
gtgactactggaccagcag

SEQ ID NO: 4924 - RNA, 19 nt, synthetic construct
  source 1..19: mol_type = other RNA
tgactactggaccagcagc

SEQ ID NO: 4925 - RNA, 19 nt, synthetic construct
  source 1..19: mol_type = other RNA
gactactggaccagcagca

SEQ ID NO: 4926 - RNA, 19 nt, synthetic construct
  source 1..19: mol_type = other RNA
actactggaccagcagcag

SEQ ID NO: 4927 - RNA, 19 nt, synthetic construct
  source 1..19: mol_type = other RNA
actggaccagcagcagcct

SEQ ID NO: 4928 - RNA, 19 nt, synthetic construct
  source 1..19: mol_type = other RNA
agcagcagcctcctcatta

SEQ ID NO: 4929 - RNA, 20 nt, synthetic construct
  source 1..20: mol_type = other RNA
tgccatgagctcacagggca

SEQ ID NO: 4930 - RNA, 20 nt, synthetic construct
  source 1..20: mol_type = other RNA
gccatgagctcacagggcag

SEQ ID NO: 4931 - RNA, 20 nt, synthetic construct
  source 1..20: mol_type = other RNA
catgagctcacagggcagtg

SEQ ID NO: 4932 - RNA, 20 nt, synthetic construct
  source 1..20: mol_type = other RNA
atgagctcacagggcagtgg

SEQ ID NO: 4933 - RNA, 20 nt, synthetic construct
  source 1..20: mol_type = other RNA
tgagctcacagggcagtggc

SEQ ID NO: 4934 - RNA, 20 nt, synthetic construct
  source 1..20: mol_type = other RNA
gagctcacagggcagtggct

SEQ ID NO: 4935 - RNA, 20 nt, synthetic construct
  source 1..20: mol_type = other RNA
ctcacagggcagtggctctg

SEQ ID NO: 4936 - RNA, 20 nt, synthetic construct
  source 1..20: mol_type = other RNA
cacagggcagtggctctgaa

SEQ ID NO: 4937 - RNA, 20 nt, synthetic construct
  source 1..20: mol_type = other RNA
gtggctctgaaagtgtgact

SEQ ID NO: 4938 - RNA, 20 nt, synthetic construct
  source 1..20: mol_type = other RNA
tggctctgaaagtgtgacta

SEQ ID NO: 4939 - RNA, 20 nt, synthetic construct
  source 1..20: mol_type = other RNA
ggctctgaaagtgtgactac

SEQ ID NO: 4940 - RNA, 20 nt, synthetic construct
  source 1..20: mol_type = other RNA
gctctgaaagtgtgactact

SEQ ID NO: 4941 - RNA, 20 nt, synthetic construct
  source 1..20: mol_type = other RNA
ctctgaaagtgtgactactg

SEQ ID NO: 4942 - RNA, 20 nt, synthetic construct
  source 1..20: mol_type = other RNA
tctgaaagtgtgactactgg

SEQ ID NO: 4943 - RNA, 20 nt, synthetic construct
  source 1..20: mol_type = other RNA
ctgaaagtgtgactactgga

SEQ ID NO: 4944 - RNA, 20 nt, synthetic construct
  source 1..20: mol_type = other RNA
tgaaagtgtgactactggac

SEQ ID NO: 4945 - RNA, 20 nt, synthetic construct
  source 1..20: mol_type = other RNA
aaagtgtgactactggacca

SEQ ID NO: 4946 - RNA, 20 nt, synthetic construct
  source 1..20: mol_type = other RNA
aagtgtgactactggaccag

SEQ ID NO: 4947 - RNA, 20 nt, synthetic construct
  source 1..20: mol_type = other RNA
agtgtgactactggaccagc

SEQ ID NO: 4948 - RNA, 20 nt, synthetic construct
  source 1..20: mol_type = other RNA
gtgtgactactggaccagca

SEQ ID NO: 4949 - RNA, 20 nt, synthetic construct
  source 1..20: mol_type = other RNA
gtgactactggaccagcagc

SEQ ID NO: 4950 - RNA, 20 nt, synthetic construct
  source 1..20: mol_type = other RNA
tgactactggaccagcagca

SEQ ID NO: 4951 - RNA, 20 nt, synthetic construct
  source 1..20: mol_type = other RNA
gactactggaccagcagcag

SEQ ID NO: 4952 - RNA, 20 nt, synthetic construct
  source 1..20: mol_type = other RNA
actactggaccagcagcagc

SEQ ID NO: 4953 - RNA, 20 nt, synthetic construct
  source 1..20: mol_type = other RNA
tactggaccagcagcagcct

SEQ ID NO: 4954 - RNA, 20 nt, synthetic construct
  source 1..20: mol_type = other RNA
actggaccagcagcagcctc

SEQ ID NO: 4955 - RNA, 20 nt, synthetic construct
  source 1..20: mol_type = other RNA
accagcagcagcctcctcat

SEQ ID NO: 4956 - RNA, 20 nt, synthetic construct
  source 1..20: mol_type = other RNA
cagcagcagcctcctcatta

SEQ ID NO: 4957 - RNA, 21 nt, synthetic construct
  source 1..21: mol_type = other RNA
agtgccatgagctcacagggc

SEQ ID NO: 4958 - RNA, 21 nt, synthetic construct
  source 1..21: mol_type = other RNA
gtgccatgagctcacagggca

SEQ ID NO: 4959 - RNA, 21 nt, synthetic construct
  source 1..21: mol_type = other RNA
tgccatgagctcacagggcag

SEQ ID NO: 4960 - RNA, 21 nt, synthetic construct
  source 1..21: mol_type = other RNA
gccatgagctcacagggcagt

SEQ ID NO: 4961 - RNA, 21 nt, synthetic construct
  source 1..21: mol_type = other RNA
ccatgagctcacagggcagtg

SEQ ID NO: 4962 - RNA, 21 nt, synthetic construct
  source 1..21: mol_type = other RNA
catgagctcacagggcagtgg

SEQ ID NO: 4963 - RNA, 21 nt, synthetic construct
  source 1..21: mol_type = other RNA
atgagctcacagggcagtggc

SEQ ID NO: 4964 - RNA, 21 nt, synthetic construct
  source 1..21: mol_type = other RNA
tgagctcacagggcagtggct

SEQ ID NO: 4965 - RNA, 21 nt, synthetic construct
  source 1..21: mol_type = other RNA
gagctcacagggcagtggctc

SEQ ID NO: 4966 - RNA, 21 nt, synthetic construct
  source 1..21: mol_type = other RNA
agctcacagggcagtggctct

SEQ ID NO: 4967 - RNA, 21 nt, synthetic construct
  source 1..21: mol_type = other RNA
gctcacagggcagtggctctg

SEQ ID NO: 4968 - RNA, 21 nt, synthetic construct
  source 1..21: mol_type = other RNA
ctcacagggcagtggctctga

SEQ ID NO: 4969 - RNA, 21 nt, synthetic construct
  source 1..21: mol_type = other RNA
tcacagggcagtggctctgaa

SEQ ID NO: 4970 - RNA, 21 nt, synthetic construct
  source 1..21: mol_type = other RNA
cacagggcagtggctctgaaa

SEQ ID NO: 4971 - RNA, 21 nt, synthetic construct
  source 1..21: mol_type = other RNA
acagggcagtggctctgaaag

SEQ ID NO: 4972 - RNA, 21 nt, synthetic construct
  source 1..21: mol_type = other RNA
cagggcagtggctctgaaagt

SEQ ID NO: 4973 - RNA, 21 nt, synthetic construct
  source 1..21: mol_type = other RNA
cagtggctctgaaagtgtgac

SEQ ID NO: 4974 - RNA, 21 nt, synthetic construct
  source 1..21: mol_type = other RNA
agtggctctgaaagtgtgact

SEQ ID NO: 4975 - RNA, 21 nt, synthetic construct
  source 1..21: mol_type = other RNA
gtggctctgaaagtgtgacta

SEQ ID NO: 4976 - RNA, 21 nt, synthetic construct
  source 1..21: mol_type = other RNA
tggctctgaaagtgtgactac

SEQ ID NO: 4977 - RNA, 21 nt, synthetic construct
  source 1..21: mol_type = other RNA
ggctctgaaagtgtgactact

SEQ ID NO: 4978 - RNA, 21 nt, synthetic construct
  source 1..21: mol_type = other RNA
gctctgaaagtgtgactactg

SEQ ID NO: 4979 - RNA, 21 nt, synthetic construct
  source 1..21: mol_type = other RNA
ctctgaaagtgtgactactgg

SEQ ID NO: 4980 - RNA, 21 nt, synthetic construct
  source 1..21: mol_type = other RNA
tctgaaagtgtgactactgga

SEQ ID NO: 4981 - RNA, 21 nt, synthetic construct
  source 1..21: mol_type = other RNA
ctgaaagtgtgactactggac

SEQ ID NO: 4982 - RNA, 21 nt, synthetic construct
  source 1..21: mol_type = other RNA
tgaaagtgtgactactggacc

SEQ ID NO: 4983 - RNA, 21 nt, synthetic construct
  source 1..21: mol_type = other RNA
gaaagtgtgactactggacca

SEQ ID NO: 4984 - RNA, 21 nt, synthetic construct
  source 1..21: mol_type = other RNA
aaagtgtgactactggaccag

SEQ ID NO: 4985 - RNA, 21 nt, synthetic construct
  source 1..21: mol_type = other RNA
aagtgtgactactggaccagc

SEQ ID NO: 4986 - RNA, 21 nt, synthetic construct
  source 1..21: mol_type = other RNA
agtgtgactactggaccagca

SEQ ID NO: 4987 - RNA, 21 nt, synthetic construct
  source 1..21: mol_type = other RNA
gtgtgactactggaccagcag

SEQ ID NO: 4988 - RNA, 21 nt, synthetic construct
  source 1..21: mol_type = other RNA
tgtgactactggaccagcagc

SEQ ID NO: 4989 - RNA, 21 nt, synthetic construct
  source 1..21: mol_type = other RNA
gtgactactggaccagcagca

SEQ ID NO: 4990 - RNA, 21 nt, synthetic construct
  source 1..21: mol_type = other RNA
tgactactggaccagcagcag

SEQ ID NO: 4991 - RNA, 21 nt, synthetic construct
  source 1..21: mol_type = other RNA
gactactggaccagcagcagc

SEQ ID NO: 4992 - RNA, 21 nt, synthetic construct
  source 1..21: mol_type = other RNA
actactggaccagcagcagcc

SEQ ID NO: 4993 - RNA, 21 nt, synthetic construct
  source 1..21: mol_type = other RNA
ctactggaccagcagcagcct

SEQ ID NO: 4994 - RNA, 21 nt, synthetic construct
  source 1..21: mol_type = other RNA
tactggaccagcagcagcctc

SEQ ID NO: 4995 - RNA, 21 nt, synthetic construct
  source 1..21: mol_type = other RNA
actggaccagcagcagcctcc

SEQ ID NO: 4996 - RNA, 21 nt, synthetic construct
  source 1..21: mol_type = other RNA
gaccagcagcagcctcctcat

SEQ ID NO: 4997 - RNA, 21 nt, synthetic construct
  source 1..21: mol_type = other RNA
accagcagcagcctcctcatt

SEQ ID NO: 4998 - RNA, 21 nt, synthetic construct
  source 1..21: mol_type = other RNA
ccagcagcagcctcctcatta

SEQ ID NO: 4999 - RNA, 21 nt, synthetic construct
  source 1..21: mol_type = other RNA
cagcagcagcctcctcattac

SEQ ID NO: 5000 - RNA, 22 nt, synthetic construct
  source 1..22: mol_type = other RNA
agtgccatgagctcacagggca

SEQ ID NO: 5001 - RNA, 22 nt, synthetic construct
  source 1..22: mol_type = other RNA
gtgccatgagctcacagggcag

SEQ ID NO: 5002 - RNA, 22 nt, synthetic construct
  source 1..22: mol_type = other RNA
tgccatgagctcacagggcagt

SEQ ID NO: 5003 - RNA, 22 nt, synthetic construct
  source 1..22: mol_type = other RNA
gccatgagctcacagggcagtg

SEQ ID NO: 5004 - RNA, 22 nt, synthetic construct
  source 1..22: mol_type = other RNA
ccatgagctcacagggcagtgg

SEQ ID NO: 5005 - RNA, 22 nt, synthetic construct
  source 1..22: mol_type = other RNA
catgagctcacagggcagtggc

SEQ ID NO: 5006 - RNA, 22 nt, synthetic construct
  source 1..22: mol_type = other RNA
atgagctcacagggcagtggct

SEQ ID NO: 5007 - RNA, 22 nt, synthetic construct
  source 1..22: mol_type = other RNA
tgagctcacagggcagtggctc

SEQ ID NO: 5008 - RNA, 22 nt, synthetic construct
  source 1..22: mol_type = other RNA
gagctcacagggcagtggctct

SEQ ID NO: 5009 - RNA, 22 nt, synthetic construct
  source 1..22: mol_type = other RNA
agctcacagggcagtggctctg

SEQ ID NO: 5010 - RNA, 22 nt, synthetic construct
  source 1..22: mol_type = other RNA
gctcacagggcagtggctctga

SEQ ID NO: 5011 - RNA, 22 nt, synthetic construct
  source 1..22: mol_type = other RNA
ctcacagggcagtggctctgaa

SEQ ID NO: 5012 - RNA, 22 nt, synthetic construct
  source 1..22: mol_type = other RNA
tcacagggcagtggctctgaaa

SEQ ID NO: 5013 - RNA, 22 nt, synthetic construct
  source 1..22: mol_type = other RNA
cacagggcagtggctctgaaag

SEQ ID NO: 5014 - RNA, 22 nt, synthetic construct
  source 1..22: mol_type = other RNA
acagggcagtggctctgaaagt

SEQ ID NO: 5015 - RNA, 22 nt, synthetic construct
  source 1..22: mol_type = other RNA
cagggcagtggctctgaaagtg

SEQ ID NO: 5016 - RNA, 22 nt, synthetic construct
  source 1..22: mol_type = other RNA
ggcagtggctctgaaagtgtga

SEQ ID NO: 5017 - RNA, 22 nt, synthetic construct
  source 1..22: mol_type = other RNA
gcagtggctctgaaagtgtgac

SEQ ID NO: 5018 - RNA, 22 nt, synthetic construct
  source 1..22: mol_type = other RNA
cagtggctctgaaagtgtgact

SEQ ID NO: 5019 - RNA, 22 nt, synthetic construct
  source 1..22: mol_type = other RNA
agtggctctgaaagtgtgacta

SEQ ID NO: 5020 - RNA, 22 nt, synthetic construct
  source 1..22: mol_type = other RNA
gtggctctgaaagtgtgactac

SEQ ID NO: 5021 - RNA, 22 nt, synthetic construct
  source 1..22: mol_type = other RNA
tggctctgaaagtgtgactact

SEQ ID NO: 5022 - RNA, 22 nt, synthetic construct
  source 1..22: mol_type = other RNA
ggctctgaaagtgtgactactg

SEQ ID NO: 5023 - RNA, 22 nt, synthetic construct
  source 1..22: mol_type = other RNA
gctctgaaagtgtgactactgg

SEQ ID NO: 5024 - RNA, 22 nt, synthetic construct
  source 1..22: mol_type = other RNA
ctctgaaagtgtgactactgga

SEQ ID NO: 5025 - RNA, 22 nt, synthetic construct
  source 1..22: mol_type = other RNA
tctgaaagtgtgactactggac

SEQ ID NO: 5026 - RNA, 22 nt, synthetic construct
  source 1..22: mol_type = other RNA
ctgaaagtgtgactactggacc

SEQ ID NO: 5027 - RNA, 22 nt, synthetic construct
  source 1..22: mol_type = other RNA
tgaaagtgtgactactggacca

SEQ ID NO: 5028 - RNA, 22 nt, synthetic construct
  source 1..22: mol_type = other RNA
gaaagtgtgactactggaccag

SEQ ID NO: 5029 - RNA, 22 nt, synthetic construct
  source 1..22: mol_type = other RNA
aaagtgtgactactggaccagc

SEQ ID NO: 5030 - RNA, 22 nt, synthetic construct
  source 1..22: mol_type = other RNA
aagtgtgactactggaccagca

SEQ ID NO: 5031 - RNA, 22 nt, synthetic construct
  source 1..22: mol_type = other RNA
agtgtgactactggaccagcag

SEQ ID NO: 5032 - RNA, 22 nt, synthetic construct
  source 1..22: mol_type = other RNA
gtgtgactactggaccagcagc

SEQ ID NO: 5033 - RNA, 22 nt, synthetic construct
  source 1..22: mol_type = other RNA
tgtgactactggaccagcagca

SEQ ID NO: 5034 - RNA, 22 nt, synthetic construct
  source 1..22: mol_type = other RNA
gtgactactggaccagcagcag

SEQ ID NO: 5035 - RNA, 22 nt, synthetic construct
  source 1..22: mol_type = other RNA
tgactactggaccagcagcagc

SEQ ID NO: 5036 - RNA, 22 nt, synthetic construct
  source 1..22: mol_type = other RNA
gactactggaccagcagcagcc

SEQ ID NO: 5037 - RNA, 22 nt, synthetic construct
  source 1..22: mol_type = other RNA
actactggaccagcagcagcct

SEQ ID NO: 5038 - RNA, 22 nt, synthetic construct
  source 1..22: mol_type = other RNA
ctactggaccagcagcagcctc

SEQ ID NO: 5039 - RNA, 22 nt, synthetic construct
  source 1..22: mol_type = other RNA
tactggaccagcagcagcctcc

SEQ ID NO: 5040 - RNA, 22 nt, synthetic construct
  source 1..22: mol_type = other RNA
actggaccagcagcagcctcct

SEQ ID NO: 5041 - RNA, 22 nt, synthetic construct
  source 1..22: mol_type = other RNA
ggaccagcagcagcctcctcat

SEQ ID NO: 5042 - RNA, 22 nt, synthetic construct
  source 1..22: mol_type = other RNA
gaccagcagcagcctcctcatt

SEQ ID NO: 5043 - RNA, 22 nt, synthetic construct
  source 1..22: mol_type = other RNA
accagcagcagcctcctcatta

SEQ ID NO: 5044 - RNA, 22 nt, synthetic construct
  source 1..22: mol_type = other RNA
ccagcagcagcctcctcattac

SEQ ID NO: 5045 - RNA, 23 nt, synthetic construct
  source 1..23: mol_type = other RNA
agtgccatgagctcacagggcag

SEQ ID NO: 5046 - RNA, 23 nt, synthetic construct
  source 1..23: mol_type = other RNA
gtgccatgagctcacagggcagt

SEQ ID NO: 5047 - RNA, 23 nt, synthetic construct
  source 1..23: mol_type = other RNA
tgccatgagctcacagggcagtg

SEQ ID NO: 5048 - RNA, 23 nt, synthetic construct
  source 1..23: mol_type = other RNA
gccatgagctcacagggcagtgg

SEQ ID NO: 5049 - RNA, 23 nt, synthetic construct
  source 1..23: mol_type = other RNA
ccatgagctcacagggcagtggc

SEQ ID NO: 5050 - RNA, 23 nt, synthetic construct
  source 1..23: mol_type = other RNA
catgagctcacagggcagtggct

SEQ ID NO: 5051 - RNA, 23 nt, synthetic construct
  source 1..23: mol_type = other RNA
atgagctcacagggcagtggctc

SEQ ID NO: 5052 - RNA, 23 nt, synthetic construct
  source 1..23: mol_type = other RNA
tgagctcacagggcagtggctct

SEQ ID NO: 5053 - RNA, 23 nt, synthetic construct
  source 1..23: mol_type = other RNA
gagctcacagggcagtggctctg

SEQ ID NO: 5054 - RNA, 23 nt, synthetic construct
  source 1..23: mol_type = other RNA
agctcacagggcagtggctctga

SEQ ID NO: 5055 - RNA, 23 nt, synthetic construct
  source 1..23: mol_type = other RNA
gctcacagggcagtggctctgaa

SEQ ID NO: 5056 - RNA, 23 nt, synthetic construct
  source 1..23: mol_type = other RNA
ctcacagggcagtggctctgaaa

SEQ ID NO: 5057 - RNA, 23 nt, synthetic construct
  source 1..23: mol_type = other RNA
tcacagggcagtggctctgaaag

SEQ ID NO: 5058 - RNA, 23 nt, synthetic construct
  source 1..23: mol_type = other RNA
cacagggcagtggctctgaaagt

SEQ ID NO: 5059 - RNA, 23 nt, synthetic construct
  source 1..23: mol_type = other RNA
acagggcagtggctctgaaagtg

SEQ ID NO: 5060 - RNA, 23 nt, synthetic construct
  source 1..23: mol_type = other RNA
cagggcagtggctctgaaagtgt

SEQ ID NO: 5061 - RNA, 23 nt, synthetic construct
  source 1..23: mol_type = other RNA
gggcagtggctctgaaagtgtga

SEQ ID NO: 5062 - RNA, 23 nt, synthetic construct
  source 1..23: mol_type = other RNA
ggcagtggctctgaaagtgtgac

SEQ ID NO: 5063 - RNA, 23 nt, synthetic construct
  source 1..23: mol_type = other RNA
gcagtggctctgaaagtgtgact

SEQ ID NO: 5064 - RNA, 23 nt, synthetic construct
  source 1..23: mol_type = other RNA
cagtggctctgaaagtgtgacta

SEQ ID NO: 5065 - RNA, 23 nt, synthetic construct
  source 1..23: mol_type = other RNA
agtggctctgaaagtgtgactac

SEQ ID NO: 5066 - RNA, 23 nt, synthetic construct
  source 1..23: mol_type = other RNA
gtggctctgaaagtgtgactact

SEQ ID NO: 5067 - RNA, 23 nt, synthetic construct
  source 1..23: mol_type = other RNA
tggctctgaaagtgtgactactg

SEQ ID NO: 5068 - RNA, 23 nt, synthetic construct
  source 1..23: mol_type = other RNA
ggctctgaaagtgtgactactgg

SEQ ID NO: 5069 - RNA, 23 nt, synthetic construct
  source 1..23: mol_type = other RNA
gctctgaaagtgtgactactgga

SEQ ID NO: 5070 - RNA, 23 nt, synthetic construct
  source 1..23: mol_type = other RNA
ctctgaaagtgtgactactggac

SEQ ID NO: 5071 - RNA, 23 nt, synthetic construct
  source 1..23: mol_type = other RNA
tctgaaagtgtgactactggacc

SEQ ID NO: 5072 - RNA, 23 nt, synthetic construct
  source 1..23: mol_type = other RNA
ctgaaagtgtgactactggacca

SEQ ID NO: 5073 - RNA, 23 nt, synthetic construct
  source 1..23: mol_type = other RNA
tgaaagtgtgactactggaccag

SEQ ID NO: 5074 - RNA, 23 nt, synthetic construct
  source 1..23: mol_type = other RNA
gaaagtgtgactactggaccagc

SEQ ID NO: 5075 - RNA, 23 nt, synthetic construct
  source 1..23: mol_type = other RNA
aaagtgtgactactggaccagca

SEQ ID NO: 5076 - RNA, 23 nt, synthetic construct
  source 1..23: mol_type = other RNA
aagtgtgactactggaccagcag

SEQ ID NO: 5077 - RNA, 23 nt, synthetic construct
  source 1..23: mol_type = other RNA
agtgtgactactggaccagcagc

SEQ ID NO: 5078 - RNA, 23 nt, synthetic construct
  source 1..23: mol_type = other RNA
gtgtgactactggaccagcagca

SEQ ID NO: 5079 - RNA, 23 nt, synthetic construct
  source 1..23: mol_type = other RNA
tgtgactactggaccagcagcag

SEQ ID NO: 5080 - RNA, 23 nt, synthetic construct
  source 1..23: mol_type = other RNA
gtgactactggaccagcagcagc

SEQ ID NO: 5081 - RNA, 23 nt, synthetic construct
  source 1..23: mol_type = other RNA
tgactactggaccagcagcagcc

SEQ ID NO: 5082 - RNA, 23 nt, synthetic construct
  source 1..23: mol_type = other RNA
gactactggaccagcagcagcct

SEQ ID NO: 5083 - RNA, 23 nt, synthetic construct
  source 1..23: mol_type = other RNA
actactggaccagcagcagcctc

SEQ ID NO: 5084 - RNA, 23 nt, synthetic construct
  source 1..23: mol_type = other RNA
ctactggaccagcagcagcctcc

SEQ ID NO: 5085 - RNA, 23 nt, synthetic construct
  source 1..23: mol_type = other RNA
tactggaccagcagcagcctcct

SEQ ID NO: 5086 - RNA, 23 nt, synthetic construct
  source 1..23: mol_type = other RNA
actggaccagcagcagcctcctc

SEQ ID NO: 5087 - RNA, 23 nt, synthetic construct
  source 1..23: mol_type = other RNA
tggaccagcagcagcctcctcat

SEQ ID NO: 5088 - RNA, 23 nt, synthetic construct
  source 1..23: mol_type = other RNA
ggaccagcagcagcctcctcatt

SEQ ID NO: 5089 - RNA, 23 nt, synthetic construct
  source 1..23: mol_type = other RNA
gaccagcagcagcctcctcatta

SEQ ID NO: 5090 - RNA, 23 nt, synthetic construct
  source 1..23: mol_type = other RNA
accagcagcagcctcctcattac

SEQ ID NO: 5091 - RNA, 24 nt, synthetic construct
  source 1..24: mol_type = other RNA
agtgccatgagctcacagggcagt

SEQ ID NO: 5092 - RNA, 24 nt, synthetic construct
  source 1..24: mol_type = other RNA
gtgccatgagctcacagggcagtg

SEQ ID NO: 5093 - RNA, 24 nt, synthetic construct
  source 1..24: mol_type = other RNA
tgccatgagctcacagggcagtgg

SEQ ID NO: 5094 - RNA, 24 nt, synthetic construct
  source 1..24: mol_type = other RNA
gccatgagctcacagggcagtggc

SEQ ID NO: 5095 - RNA, 24 nt, synthetic construct
  source 1..24: mol_type = other RNA
ccatgagctcacagggcagtggct

SEQ ID NO: 5096 - RNA, 24 nt, synthetic construct
  source 1..24: mol_type = other RNA
catgagctcacagggcagtggctc

SEQ ID NO: 5097 - RNA, 24 nt, synthetic construct
  source 1..24: mol_type = other RNA
atgagctcacagggcagtggctct

SEQ ID NO: 5098 - RNA, 24 nt, synthetic construct
  source 1..24: mol_type = other RNA
tgagctcacagggcagtggctctg

SEQ ID NO: 5099 - RNA, 24 nt, synthetic construct
  source 1..24: mol_type = other RNA
gagctcacagggcagtggctctga

SEQ ID NO: 5100 - RNA, 24 nt, synthetic construct
  source 1..24: mol_type = other RNA
agctcacagggcagtggctctgaa

SEQ ID NO: 5101 - RNA, 24 nt, synthetic construct
  source 1..24: mol_type = other RNA
gctcacagggcagtggctctgaaa

SEQ ID NO: 5102 - RNA, 24 nt, synthetic construct
  source 1..24: mol_type = other RNA
ctcacagggcagtggctctgaaag

SEQ ID NO: 5103 - RNA, 24 nt, synthetic construct
  source 1..24: mol_type = other RNA
tcacagggcagtggctctgaaagt

SEQ ID NO: 5104 - RNA, 24 nt, synthetic construct
  source 1..24: mol_type = other RNA
cacagggcagtggctctgaaagtg

SEQ ID NO: 5105 - RNA, 24 nt, synthetic construct
  source 1..24: mol_type = other RNA
acagggcagtggctctgaaagtgt

SEQ ID NO: 5106 - RNA, 24 nt, synthetic construct
  source 1..24: mol_type = other RNA
cagggcagtggctctgaaagtgtg

SEQ ID NO: 5107 - RNA, 24 nt, synthetic construct
  source 1..24: mol_type = other RNA
agggcagtggctctgaaagtgtga

SEQ ID NO: 5108 - RNA, 24 nt, synthetic construct
  source 1..24: mol_type = other RNA
gggcagtggctctgaaagtgtgac

SEQ ID NO: 5109 - RNA, 24 nt, synthetic construct
  source 1..24: mol_type = other RNA
ggcagtggctctgaaagtgtgact

SEQ ID NO: 5110 - RNA, 24 nt, synthetic construct
  source 1..24: mol_type = other RNA
gcagtggctctgaaagtgtgacta

SEQ ID NO: 5111 - RNA, 24 nt, synthetic construct
  source 1..24: mol_type = other RNA
cagtggctctgaaagtgtgactac

SEQ ID NO: 5112 - RNA, 24 nt, synthetic construct
  source 1..24: mol_type = other RNA
agtggctctgaaagtgtgactact

SEQ ID NO: 5113 - RNA, 24 nt, synthetic construct
  source 1..24: mol_type = other RNA
gtggctctgaaagtgtgactactg

SEQ ID NO: 5114 - RNA, 24 nt, synthetic construct
  source 1..24: mol_type = other RNA
tggctctgaaagtgtgactactgg

SEQ ID NO: 5115 - RNA, 24 nt, synthetic construct
  source 1..24: mol_type = other RNA
ggctctgaaagtgtgactactgga

SEQ ID NO: 5116 - RNA, 24 nt, synthetic construct
  source 1..24: mol_type = other RNA
gctctgaaagtgtgactactggac

SEQ ID NO: 5117 - RNA, 24 nt, synthetic construct
  source 1..24: mol_type = other RNA
ctctgaaagtgtgactactggacc

SEQ ID NO: 5118 - RNA, 24 nt, synthetic construct
  source 1..24: mol_type = other RNA
tctgaaagtgtgactactggacca

SEQ ID NO: 5119 - RNA, 24 nt, synthetic construct
  source 1..24: mol_type = other RNA
ctgaaagtgtgactactggaccag

SEQ ID NO: 5120 - RNA, 24 nt, synthetic construct
  source 1..24: mol_type = other RNA
tgaaagtgtgactactggaccagc

SEQ ID NO: 5121 - RNA, 24 nt, synthetic construct
  source 1..24: mol_type = other RNA
gaaagtgtgactactggaccagca

SEQ ID NO: 5122 - RNA, 24 nt, synthetic construct
  source 1..24: mol_type = other RNA
aaagtgtgactactggaccagcag

SEQ ID NO: 5123 - RNA, 24 nt, synthetic construct
  source 1..24: mol_type = other RNA
aagtgtgactactggaccagcagc

SEQ ID NO: 5124 - RNA, 24 nt, synthetic construct
  source 1..24: mol_type = other RNA
agtgtgactactggaccagcagca

SEQ ID NO: 5125 - RNA, 24 nt, synthetic construct
  source 1..24: mol_type = other RNA
gtgtgactactggaccagcagcag

SEQ ID NO: 5126 - RNA, 24 nt, synthetic construct
  source 1..24: mol_type = other RNA
tgtgactactggaccagcagcagc

SEQ ID NO: 5127 - RNA, 24 nt, synthetic construct
  source 1..24: mol_type = other RNA
gtgactactggaccagcagcagcc

SEQ ID NO: 5128 - RNA, 24 nt, synthetic construct
  source 1..24: mol_type = other RNA
tgactactggaccagcagcagcct

SEQ ID NO: 5129 - RNA, 24 nt, synthetic construct
  source 1..24: mol_type = other RNA
gactactggaccagcagcagcctc

SEQ ID NO: 5130 - RNA, 24 nt, synthetic construct
  source 1..24: mol_type = other RNA
actactggaccagcagcagcctcc

SEQ ID NO: 5131 - RNA, 24 nt, synthetic construct
  source 1..24: mol_type = other RNA
ctactggaccagcagcagcctcct

SEQ ID NO: 5132 - RNA, 24 nt, synthetic construct
  source 1..24: mol_type = other RNA
tactggaccagcagcagcctcctc

SEQ ID NO: 5133 - RNA, 24 nt, synthetic construct
  source 1..24: mol_type = other RNA
actggaccagcagcagcctcctca

SEQ ID NO: 5134 - RNA, 24 nt, synthetic construct
  source 1..24: mol_type = other RNA
ctggaccagcagcagcctcctcat

SEQ ID NO: 5135 - RNA, 24 nt, synthetic construct
  source 1..24: mol_type = other RNA
tggaccagcagcagcctcctcatt

SEQ ID NO: 5136 - RNA, 24 nt, synthetic construct
  source 1..24: mol_type = other RNA
ggaccagcagcagcctcctcatta

SEQ ID NO: 5137 - RNA, 24 nt, synthetic construct
  source 1..24: mol_type = other RNA
gaccagcagcagcctcctcattac

SEQ ID NO: 5138 - RNA, 25 nt, synthetic construct
  source 1..25: mol_type = other RNA
agtgccatgagctcacagggcagtg

SEQ ID NO: 5139 - RNA, 25 nt, synthetic construct
  source 1..25: mol_type = other RNA
gtgccatgagctcacagggcagtgg

SEQ ID NO: 5140 - RNA, 25 nt, synthetic construct
  source 1..25: mol_type = other RNA
tgccatgagctcacagggcagtggc

SEQ ID NO: 5141 - RNA, 25 nt, synthetic construct
  source 1..25: mol_type = other RNA
gccatgagctcacagggcagtggct

SEQ ID NO: 5142 - RNA, 25 nt, synthetic construct
  source 1..25: mol_type = other RNA
ccatgagctcacagggcagtggctc

SEQ ID NO: 5143 - RNA, 25 nt, synthetic construct
  source 1..25: mol_type = other RNA
catgagctcacagggcagtggctct

SEQ ID NO: 5144 - RNA, 25 nt, synthetic construct
  source 1..25: mol_type = other RNA
atgagctcacagggcagtggctctg

SEQ ID NO: 5145 - RNA, 25 nt, synthetic construct
  source 1..25: mol_type = other RNA
tgagctcacagggcagtggctctga

SEQ ID NO: 5146 - RNA, 25 nt, synthetic construct
  source 1..25: mol_type = other RNA
gagctcacagggcagtggctctgaa

SEQ ID NO: 5147 - RNA, 25 nt, synthetic construct
  source 1..25: mol_type = other RNA
agctcacagggcagtggctctgaaa

SEQ ID NO: 5148 - RNA, 25 nt, synthetic construct
  source 1..25: mol_type = other RNA
gctcacagggcagtggctctgaaag

SEQ ID NO: 5149 - RNA, 25 nt, synthetic construct
  source 1..25: mol_type = other RNA
ctcacagggcagtggctctgaaagt

SEQ ID NO: 5150 - RNA, 25 nt, synthetic construct
  source 1..25: mol_type = other RNA
tcacagggcagtggctctgaaagtg

SEQ ID NO: 5151 - RNA, 25 nt, synthetic construct
  source 1..25: mol_type = other RNA
cacagggcagtggctctgaaagtgt

SEQ ID NO: 5152 - RNA, 25 nt, synthetic construct
  source 1..25: mol_type = other RNA
acagggcagtggctctgaaagtgtg

SEQ ID NO: 5153 - RNA, 25 nt, synthetic construct
  source 1..25: mol_type = other RNA
cagggcagtggctctgaaagtgtga

SEQ ID NO: 5154 - RNA, 25 nt, synthetic construct
  source 1..25: mol_type = other RNA
agggcagtggctctgaaagtgtgac

SEQ ID NO: 5155 - RNA, 25 nt, synthetic construct
  source 1..25: mol_type = other RNA
gggcagtggctctgaaagtgtgact

SEQ ID NO: 5156 - RNA, 25 nt, synthetic construct
  source 1..25: mol_type = other RNA
ggcagtggctctgaaagtgtgacta

SEQ ID NO: 5157 - RNA, 25 nt, synthetic construct
  source 1..25: mol_type = other RNA
gcagtggctctgaaagtgtgactac

SEQ ID NO: 5158 - RNA, 25 nt, synthetic construct
  source 1..25: mol_type = other RNA
cagtggctctgaaagtgtgactact

SEQ ID NO: 5159 - RNA, 25 nt, synthetic construct
  source 1..25: mol_type = other RNA
agtggctctgaaagtgtgactactg

SEQ ID NO: 5160 - RNA, 25 nt, synthetic construct
  source 1..25: mol_type = other RNA
gtggctctgaaagtgtgactactgg

SEQ ID NO: 5161 - RNA, 25 nt, synthetic construct
  source 1..25: mol_type = other RNA
tggctctgaaagtgtgactactgga

SEQ ID NO: 5162 - RNA, 25 nt, synthetic construct
  source 1..25: mol_type = other RNA
ggctctgaaagtgtgactactggac

SEQ ID NO: 5163 - RNA, 25 nt, synthetic construct
  source 1..25: mol_type = other RNA
gctctgaaagtgtgactactggacc

SEQ ID NO: 5164 - RNA, 25 nt, synthetic construct
  source 1..25: mol_type = other RNA
ctctgaaagtgtgactactggacca

SEQ ID NO: 5165 - RNA, 25 nt, synthetic construct
  source 1..25: mol_type = other RNA
tctgaaagtgtgactactggaccag

SEQ ID NO: 5166 - RNA, 25 nt, synthetic construct
  source 1..25: mol_type = other RNA
ctgaaagtgtgactactggaccagc

SEQ ID NO: 5167 - RNA, 25 nt, synthetic construct
  source 1..25: mol_type = other RNA
tgaaagtgtgactactggaccagca

SEQ ID NO: 5168 - RNA, 25 nt, synthetic construct
  source 1..25: mol_type = other RNA
gaaagtgtgactactggaccagcag

SEQ ID NO: 5169 - RNA, 25 nt, synthetic construct
  source 1..25: mol_type = other RNA
aaagtgtgactactggaccagcagc

SEQ ID NO: 5170 - RNA, 25 nt, synthetic construct
  source 1..25: mol_type = other RNA
aagtgtgactactggaccagcagca

SEQ ID NO: 5171 - RNA, 25 nt, synthetic construct
  source 1..25: mol_type = other RNA
agtgtgactactggaccagcagcag

SEQ ID NO: 5172 - RNA, 25 nt, synthetic construct
  source 1..25: mol_type = other RNA
gtgtgactactggaccagcagcagc

SEQ ID NO: 5173 - RNA, 25 nt, synthetic construct
  source 1..25: mol_type = other RNA
tgtgactactggaccagcagcagcc

SEQ ID NO: 5174 - RNA, 25 nt, synthetic construct
  source 1..25: mol_type = other RNA
gtgactactggaccagcagcagcct

SEQ ID NO: 5175 - RNA, 25 nt, synthetic construct
  source 1..25: mol_type = other RNA
tgactactggaccagcagcagcctc

SEQ ID NO: 5176 - RNA, 25 nt, synthetic construct
  source 1..25: mol_type = other RNA
gactactggaccagcagcagcctcc

SEQ ID NO: 5177 - RNA, 25 nt, synthetic construct
  source 1..25: mol_type = other RNA
actactggaccagcagcagcctcct

SEQ ID NO: 5178 - RNA, 25 nt, synthetic construct
  source 1..25: mol_type = other RNA
ctactggaccagcagcagcctcctc

SEQ ID NO: 5179 - RNA, 25 nt, synthetic construct
  source 1..25: mol_type = other RNA
tactggaccagcagcagcctcctca

SEQ ID NO: 5180 - RNA, 25 nt, synthetic construct
  source 1..25: mol_type = other RNA
actggaccagcagcagcctcctcat

SEQ ID NO: 5181 - RNA, 25 nt, synthetic construct
  source 1..25: mol_type = other RNA
ctggaccagcagcagcctcctcatt

SEQ ID NO: 5182 - RNA, 25 nt, synthetic construct
  source 1..25: mol_type = other RNA
tggaccagcagcagcctcctcatta

SEQ ID NO: 5183 - RNA, 25 nt, synthetic construct
  source 1..25: mol_type = other RNA
ggaccagcagcagcctcctcattac

SEQ ID NO: 5184 - RNA, 26 nt, synthetic construct
  source 1..26: mol_type = other RNA
agtgccatgagctcacagggcagtgg

SEQ ID NO: 5185 - RNA, 26 nt, synthetic construct
  source 1..26: mol_type = other RNA
gtgccatgagctcacagggcagtggc

SEQ ID NO: 5186 - RNA, 26 nt, synthetic construct
  source 1..26: mol_type = other RNA
tgccatgagctcacagggcagtggct

SEQ ID NO: 5187 - RNA, 26 nt, synthetic construct
  source 1..26: mol_type = other RNA
gccatgagctcacagggcagtggctc

SEQ ID NO: 5188 - RNA, 26 nt, synthetic construct
  source 1..26: mol_type = other RNA
ccatgagctcacagggcagtggctct

SEQ ID NO: 5189 - RNA, 26 nt, synthetic construct
  source 1..26: mol_type = other RNA
catgagctcacagggcagtggctctg

SEQ ID NO: 5190 - RNA, 26 nt, synthetic construct
  source 1..26: mol_type = other RNA
atgagctcacagggcagtggctctga

SEQ ID NO: 5191 - RNA, 26 nt, synthetic construct
  source 1..26: mol_type = other RNA
tgagctcacagggcagtggctctgaa

SEQ ID NO: 5192 - RNA, 26 nt, synthetic construct
  source 1..26: mol_type = other RNA
gagctcacagggcagtggctctgaaa

SEQ ID NO: 5193 - RNA, 26 nt, synthetic construct
  source 1..26: mol_type = other RNA
agctcacagggcagtggctctgaaag

SEQ ID NO: 5194 - RNA, 26 nt, synthetic construct
  source 1..26: mol_type = other RNA
gctcacagggcagtggctctgaaagt

SEQ ID NO: 5195 - RNA, 26 nt, synthetic construct
  source 1..26: mol_type = other RNA
ctcacagggcagtggctctgaaagtg

SEQ ID NO: 5196 - RNA, 26 nt, synthetic construct
  source 1..26: mol_type = other RNA
tcacagggcagtggctctgaaagtgt

SEQ ID NO: 5197 - RNA, 26 nt, synthetic construct
  source 1..26: mol_type = other RNA
cacagggcagtggctctgaaagtgtg

SEQ ID NO: 5198 - RNA, 26 nt, synthetic construct
  source 1..26: mol_type = other RNA
acagggcagtggctctgaaagtgtga

SEQ ID NO: 5199 - RNA, 26 nt, synthetic construct
  source 1..26: mol_type = other RNA
cagggcagtggctctgaaagtgtgac

SEQ ID NO: 5200 - RNA, 26 nt, synthetic construct
  source 1..26: mol_type = other RNA
agggcagtggctctgaaagtgtgact

SEQ ID NO: 5201 - RNA, 26 nt, synthetic construct
  source 1..26: mol_type = other RNA
gggcagtggctctgaaagtgtgacta

SEQ ID NO: 5202 - RNA, 26 nt, synthetic construct
  source 1..26: mol_type = other RNA
ggcagtggctctgaaagtgtgactac

SEQ ID NO: 5203 - RNA, 26 nt, synthetic construct
  source 1..26: mol_type = other RNA
gcagtggctctgaaagtgtgactact

SEQ ID NO: 5204 - RNA, 26 nt, synthetic construct
  source 1..26: mol_type = other RNA
cagtggctctgaaagtgtgactactg

SEQ ID NO: 5205 - RNA, 26 nt, synthetic construct
  source 1..26: mol_type = other RNA
agtggctctgaaagtgtgactactgg

SEQ ID NO: 5206 - RNA, 26 nt, synthetic construct
  source 1..26: mol_type = other RNA
gtggctctgaaagtgtgactactgga

SEQ ID NO: 5207 - RNA, 26 nt, synthetic construct
  source 1..26: mol_type = other RNA
tggctctgaaagtgtgactactggac

SEQ ID NO: 5208 - RNA, 26 nt, synthetic construct
  source 1..26: mol_type = other RNA
ggctctgaaagtgtgactactggacc

SEQ ID NO: 5209 - RNA, 26 nt, synthetic construct
  source 1..26: mol_type = other RNA
gctctgaaagtgtgactactggacca

SEQ ID NO: 5210 - RNA, 26 nt, synthetic construct
  source 1..26: mol_type = other RNA
ctctgaaagtgtgactactggaccag

SEQ ID NO: 5211 - RNA, 26 nt, synthetic construct
  source 1..26: mol_type = other RNA
tctgaaagtgtgactactggaccagc

SEQ ID NO: 5212 - RNA, 26 nt, synthetic construct
  source 1..26: mol_type = other RNA
ctgaaagtgtgactactggaccagca

SEQ ID NO: 5213 - RNA, 26 nt, synthetic construct
  source 1..26: mol_type = other RNA
tgaaagtgtgactactggaccagcag

SEQ ID NO: 5214 - RNA, 26 nt, synthetic construct
  source 1..26: mol_type = other RNA
gaaagtgtgactactggaccagcagc

SEQ ID NO: 5215 - RNA, 26 nt, synthetic construct
  source 1..26: mol_type = other RNA
aaagtgtgactactggaccagcagca

SEQ ID NO: 5216 - RNA, 26 nt, synthetic construct
  source 1..26: mol_type = other RNA
aagtgtgactactggaccagcagcag

SEQ ID NO: 5217 - RNA, 26 nt, synthetic construct
  source 1..26: mol_type = other RNA
agtgtgactactggaccagcagcagc

SEQ ID NO: 5218 - RNA, 26 nt, synthetic construct
  source 1..26: mol_type = other RNA
gtgtgactactggaccagcagcagcc

SEQ ID NO: 5219 - RNA, 26 nt, synthetic construct
  source 1..26: mol_type = other RNA
tgtgactactggaccagcagcagcct

SEQ ID NO: 5220 - RNA, 26 nt, synthetic construct
  source 1..26: mol_type = other RNA
gtgactactggaccagcagcagcctc

SEQ ID NO: 5221 - RNA, 26 nt, synthetic construct
  source 1..26: mol_type = other RNA
tgactactggaccagcagcagcctcc

SEQ ID NO: 5222 - RNA, 26 nt, synthetic construct
  source 1..26: mol_type = other RNA
gactactggaccagcagcagcctcct

SEQ ID NO: 5223 - RNA, 26 nt, synthetic construct
  source 1..26: mol_type = other RNA
actactggaccagcagcagcctcctc

SEQ ID NO: 5224 - RNA, 26 nt, synthetic construct
  source 1..26: mol_type = other RNA
ctactggaccagcagcagcctcctca

SEQ ID NO: 5225 - RNA, 26 nt, synthetic construct
  source 1..26: mol_type = other RNA
tactggaccagcagcagcctcctcat

SEQ ID NO: 5226 - RNA, 26 nt, synthetic construct
  source 1..26: mol_type = other RNA
actggaccagcagcagcctcctcatt

SEQ ID NO: 5227 - RNA, 26 nt, synthetic construct
  source 1..26: mol_type = other RNA
ctggaccagcagcagcctcctcatta

SEQ ID NO: 5228 - RNA, 26 nt, synthetic construct
  source 1..26: mol_type = other RNA
tggaccagcagcagcctcctcattac

SEQ ID NO: 5229 - RNA, 20 nt, synthetic construct
  source 1..20: mol_type = other RNA
gaatttaactgaaaaactgc

SEQ ID NO: 5230 - RNA, 20 nt, synthetic construct
  source 1..20: mol_type = other RNA
tgagaatagaatttaactga

SEQ ID NO: 5231 - RNA, 20 nt, synthetic construct
  source 1..20: mol_type = other RNA
gtgctataaatgagaataga

SEQ ID NO: 5232 - RNA, 20 nt, synthetic construct
  source 1..20: mol_type = other RNA
aaactgtgctataaatgaga

SEQ ID NO: 5233 - RNA, 20 nt, synthetic construct
  source 1..20: mol_type = other RNA
atactaaaactgtgctataa

SEQ ID NO: 5234 - RNA, 20 nt, synthetic construct
  source 1..20: mol_type = other RNA
caggcatactaaaactgtgc

SEQ ID NO: 5235 - RNA, 20 nt, synthetic construct
  source 1..20: mol_type = other RNA
ttatggaatcaggcatacta

SEQ ID NO: 5236 - RNA, 20 nt, synthetic construct
  source 1..20: mol_type = other RNA
gcacgttatggaatcaggca

SEQ ID NO: 5237 - RNA, 20 nt, synthetic construct
  source 1..20: mol_type = other RNA
cattagatagcacgttatgg

SEQ ID NO: 5238 - RNA, 20 nt, synthetic construct
  source 1..20: mol_type = other RNA
agccacattagatagcacgt

SEQ ID NO: 5239 - RNA, 20 nt, synthetic construct
  source 1..20: mol_type = other RNA
agagcagccacattagatag

SEQ ID NO: 5240 - RNA, 20 nt, synthetic construct
  source 1..20: mol_type = other RNA
ttattagagcagccacatta

SEQ ID NO: 5241 - RNA, 20 nt, synthetic construct
  source 1..20: mol_type = other RNA
gaaattattattagagcagc

SEQ ID NO: 5242 - RNA, 20 nt, synthetic construct
  source 1..20: mol_type = other RNA
gactgagaaattattattag

SEQ ID NO: 5243 - RNA, 20 nt, synthetic construct
  source 1..20: mol_type = other RNA
cccaaggactgagaaattat

SEQ ID NO: 5244 - RNA, 20 nt, synthetic construct
  source 1..20: mol_type = other RNA
acactcccaaggactgagaa

SEQ ID NO: 5245 - RNA, 20 nt, synthetic construct
  source 1..20: mol_type = other RNA
gctaaaaacactcccaagga

SEQ ID NO: 5246 - RNA, 20 nt, synthetic construct
  source 1..20: mol_type = other RNA
catcagctaaaaacactccc

SEQ ID NO: 5247 - RNA, 20 nt, synthetic construct
  source 1..20: mol_type = other RNA
tcgggtcacatcagctaaaa

SEQ ID NO: 5248 - RNA, 20 nt, synthetic construct
  source 1..20: mol_type = other RNA
ggaatttcgggtcacatcag

SEQ ID NO: 5249 - RNA, 20 nt, synthetic construct
  source 1..20: mol_type = other RNA
gaataggaatttcgggtcac

SEQ ID NO: 5250 - RNA, 20 nt, synthetic construct
  source 1..20: mol_type = other RNA
tataggaataggaatttcgg

SEQ ID NO: 5251 - RNA, 20 nt, synthetic construct
  source 1..20: mol_type = other RNA
gacaacatataggaatagga

SEQ ID NO: 5252 - RNA, 20 nt, synthetic construct
  source 1..20: mol_type = other RNA
gaggcctggacaacatatag

SEQ ID NO: 5253 - RNA, 20 nt, synthetic construct
  source 1..20: mol_type = other RNA
ggaattgaggcctggacaac

SEQ ID NO: 5254 - RNA, 20 nt, synthetic construct
  source 1..20: mol_type = other RNA
gttccccaggaattgaggcc

SEQ ID NO: 5255 - RNA, 20 nt, synthetic construct
  source 1..20: mol_type = other RNA
tctcggttccccaggaattg

SEQ ID NO: 5256 - RNA, 20 nt, synthetic construct
  source 1..20: mol_type = other RNA
agtcactgtctcggttcccc

SEQ ID NO: 5257 - RNA, 20 nt, synthetic construct
  source 1..20: mol_type = other RNA
tatcccagtcactgtctcgg

SEQ ID NO: 5258 - RNA, 20 nt, synthetic construct
  source 1..20: mol_type = other RNA
agagttatcccagtcactgt

SEQ ID NO: 5259 - RNA, 20 nt, synthetic construct
  source 1..20: mol_type = other RNA
ttccaagagttatcccagtc

SEQ ID NO: 5260 - RNA, 20 nt, synthetic construct
  source 1..20: mol_type = other RNA
tgacccattccaagagttat

SEQ ID NO: 5261 - RNA, 20 nt, synthetic construct
  source 1..20: mol_type = other RNA
gtgatctgacccattccaag

SEQ ID NO: 5262 - RNA, 20 nt, synthetic construct
  source 1..20: mol_type = other RNA
agagagaggtgatctgaccc

SEQ ID NO: 5263 - RNA, 20 nt, synthetic construct
  source 1..20: mol_type = other RNA
acctctttcagagagaggtg

SEQ ID NO: 5264 - RNA, 20 nt, synthetic construct
  source 1..20: mol_type = other RNA
tcagataacctctttcagag

SEQ ID NO: 5265 - RNA, 20 nt, synthetic construct
  source 1..20: mol_type = other RNA
cttatctttcagataacctc

SEQ ID NO: 5266 - RNA, 20 nt, synthetic construct
  source 1..20: mol_type = other RNA
ttcatcttatctttcagata

SEQ ID NO: 5267 - RNA, 20 nt, synthetic construct
  source 1..20: mol_type = other RNA
gttctccatttcatcttatc

SEQ ID NO: 5268 - RNA, 20 nt, synthetic construct
  source 1..20: mol_type = other RNA
caactgtgttctccatttca

SEQ ID NO: 5269 - RNA, 20 nt, synthetic construct
  source 1..20: mol_type = other RNA
ctgcaatcacaactgtgttc

SEQ ID NO: 5270 - RNA, 20 nt, synthetic construct
  source 1..20: mol_type = other RNA
ggatttctgcaatcacaact

SEQ ID NO: 5271 - RNA, 20 nt, synthetic construct
  source 1..20: mol_type = other RNA
acaagaaggatttctgcaat

SEQ ID NO: 5272 - RNA, 20 nt, synthetic construct
  source 1..20: mol_type = other RNA
aagcacacaagaaggatttc

SEQ ID NO: 5273 - RNA, 20 nt, synthetic construct
  source 1..20: mol_type = other RNA
gcattaacaagcacacaaga

SEQ ID NO: 5274 - RNA, 20 nt, synthetic construct
  source 1..20: mol_type = other RNA
acaaagagcattaacaagca

SEQ ID NO: 5275 - RNA, 20 nt, synthetic construct
  source 1..20: mol_type = other RNA
aacagacaaagagcattaac

SEQ ID NO: 5276 - RNA, 20 nt, synthetic construct
  source 1..20: mol_type = other RNA
aggcacaacagacaaagagc

SEQ ID NO: 5277 - RNA, 20 nt, synthetic construct
  source 1..20: mol_type = other RNA
cctgaaaaggcacaacagac

SEQ ID NO: 5278 - RNA, 20 nt, synthetic construct
  source 1..20: mol_type = other RNA
gcacttccctgaaaaggcac

SEQ ID NO: 5279 - RNA, 20 nt, synthetic construct
  source 1..20: mol_type = other RNA
aagcttgggcacttccctga

SEQ ID NO: 5280 - RNA, 20 nt, synthetic construct
  source 1..20: mol_type = other RNA
ctcccaagcttgggcacttc

SEQ ID NO: 5281 - RNA, 20 nt, synthetic construct
  source 1..20: mol_type = other RNA
tccatgtcctcccaagcttg

SEQ ID NO: 5282 - RNA, 20 nt, synthetic construct
  source 1..20: mol_type = other RNA
tgttctccatgtcctcccaa

SEQ ID NO: 5283 - RNA, 20 nt, synthetic construct
  source 1..20: mol_type = other RNA
gcctattgttctccatgtcc

SEQ ID NO: 5284 - RNA, 20 nt, synthetic construct
  source 1..20: mol_type = other RNA
caatatgcctattgttctcc

SEQ ID NO: 5285 - RNA, 20 nt, synthetic construct
  source 1..20: mol_type = other RNA
actctccaatatgcctattg

SEQ ID NO: 5286 - RNA, 20 nt, synthetic construct
  source 1..20: mol_type = other RNA
cactcactctccaatatgcc

SEQ ID NO: 5287 - RNA, 20 nt, synthetic construct
  source 1..20: mol_type = other RNA
aaccccactcactctccaat

SEQ ID NO: 5288 - RNA, 20 nt, synthetic construct
  source 1..20: mol_type = other RNA
gactccaaaccccactcact

SEQ ID NO: 5289 - RNA, 20 nt, synthetic construct
  source 1..20: mol_type = other RNA
ggctctgactccaaacccca

SEQ ID NO: 5290 - RNA, 20 nt, synthetic construct
  source 1..20: mol_type = other RNA
ctaaggggctctgactccaa

SEQ ID NO: 5291 - RNA, 20 nt, synthetic construct
  source 1..20: mol_type = other RNA
caagtctaaggggctctgac

SEQ ID NO: 5292 - RNA, 20 nt, synthetic construct
  source 1..20: mol_type = other RNA
gtaggattcaagtctaaggg

SEQ ID NO: 5293 - RNA, 20 nt, synthetic construct
  source 1..20: mol_type = other RNA
gcagagtaggattcaagtct

SEQ ID NO: 5294 - RNA, 20 nt, synthetic construct
  source 1..20: mol_type = other RNA
acagctggcagagtaggatt

SEQ ID NO: 5295 - RNA, 20 nt, synthetic construct
  source 1..20: mol_type = other RNA
gactgcacagctggcagagt

SEQ ID NO: 5296 - RNA, 20 nt, synthetic construct
  source 1..20: mol_type = other RNA
tgtctgggactgcacagctg

SEQ ID NO: 5297 - RNA, 20 nt, synthetic construct
  source 1..20: mol_type = other RNA
ggatttgtctgggactgcac

SEQ ID NO: 5298 - RNA, 20 nt, synthetic construct
  source 1..20: mol_type = other RNA
taaggggatttgtctgggac

SEQ ID NO: 5299 - RNA, 20 nt, synthetic construct
  source 1..20: mol_type = other RNA
cagaaaggtaaggggatttg

SEQ ID NO: 5300 - RNA, 20 nt, synthetic construct
  source 1..20: mol_type = other RNA
actaggctcagaaaggtaag

SEQ ID NO: 5301 - RNA, 20 nt, synthetic construct
  source 1..20: mol_type = other RNA
atataagaaactaggctcag

SEQ ID NO: 5302 - RNA, 20 nt, synthetic construct
  source 1..20: mol_type = other RNA
gtgagcactaacatcatttt

SEQ ID NO: 5303 - RNA, 20 nt, synthetic construct
  source 1..20: mol_type = other RNA
ataaagtgagcactaacatc

SEQ ID NO: 5304 - RNA, 20 nt, synthetic construct
  source 1..20: mol_type = other RNA
caatcttataaagtgagcac

SEQ ID NO: 5305 - RNA, 20 nt, synthetic construct
  source 1..20: mol_type = other RNA
tagtcattatctctaatctt

SEQ ID NO: 5306 - RNA, 20 nt, synthetic construct
  source 1..20: mol_type = other RNA
ggagcttaatagtcattatc

SEQ ID NO: 5307 - RNA, 20 nt, synthetic construct
  source 1..20: mol_type = other RNA
cactactaggagcttaatag

SEQ ID NO: 5308 - RNA, 20 nt, synthetic construct
  source 1..20: mol_type = other RNA
tctaggcactactaggagct

SEQ ID NO: 5309 - RNA, 20 nt, synthetic construct
  source 1..20: mol_type = other RNA
gtttctctaggcactactag

SEQ ID NO: 5310 - RNA, 20 nt, synthetic construct
  source 1..20: mol_type = other RNA
gcattcactgtttctctagg

SEQ ID NO: 5311 - RNA, 20 nt, synthetic construct
  source 1..20: mol_type = other RNA
attgagcattcactgtttct

SEQ ID NO: 5312 - RNA, 20 nt, synthetic construct
  source 1..20: mol_type = other RNA
gttttattaacagcaattac

SEQ ID NO: 5313 - RNA, 20 nt, synthetic construct
  source 1..20: mol_type = other RNA
gttttaataggtaaatattg

SEQ ID NO: 5314 - RNA, 20 nt, synthetic construct
  source 1..20: mol_type = other RNA
gattaatgatgttttaatag

SEQ ID NO: 5315 - RNA, 20 nt, synthetic construct
  source 1..20: mol_type = other RNA
gaatagggattaatgatgtt

SEQ ID NO: 5316 - RNA, 20 nt, synthetic construct
  source 1..20: mol_type = other RNA
tcatcgaatagggattaatg

SEQ ID NO: 5317 - RNA, 20 nt, synthetic construct
  source 1..20: mol_type = other RNA
tgacatttcatcgaataggg

SEQ ID NO: 5318 - RNA, 20 nt, synthetic construct
  source 1..20: mol_type = other RNA
tcaaatgacatttcatcgaa

SEQ ID NO: 5319 - RNA, 20 nt, synthetic construct
  source 1..20: mol_type = other RNA
ccagtgtcaaatgacatttc

SEQ ID NO: 5320 - RNA, 20 nt, synthetic construct
  source 1..20: mol_type = other RNA
actccccagtgtcaaatgac

SEQ ID NO: 5321 - RNA, 20 nt, synthetic construct
  source 1..20: mol_type = other RNA
tagattactccccagtgtca

SEQ ID NO: 5322 - RNA, 20 nt, synthetic construct
  source 1..20: mol_type = other RNA
agtttgttagattactcccc

SEQ ID NO: 5323 - RNA, 20 nt, synthetic construct
  source 1..20: mol_type = other RNA
catgtagtttgttagattac

SEQ ID NO: 5324 - RNA, 20 nt, synthetic construct
  source 1..20: mol_type = other RNA
atcttcatgtagtttgttag

SEQ ID NO: 5325 - RNA, 20 nt, synthetic construct
  source 1..20: mol_type = other RNA
tatcactatcttcatgtagt

SEQ ID NO: 5326 - RNA, 20 nt, synthetic construct
  source 1..20: mol_type = other RNA
acataattatcactatcttc

SEQ ID NO: 5327 - RNA, 20 nt, synthetic construct
  source 1..20: mol_type = other RNA
gttagcaacataattatcac

SEQ ID NO: 5328 - RNA, 20 nt, synthetic construct
  source 1..20: mol_type = other RNA
ctgagtacagttagcaacat

SEQ ID NO: 5329 - RNA, 20 nt, synthetic construct
  source 1..20: mol_type = other RNA
cttttcctgagtacagttag

SEQ ID NO: 5330 - RNA, 20 nt, synthetic construct
  source 1..20: mol_type = other RNA
gagtcccttttcctgagtac

SEQ ID NO: 5331 - RNA, 20 nt, synthetic construct
  source 1..20: mol_type = other RNA
agcttgagtcccttttcctg

SEQ ID NO: 5332 - RNA, 20 nt, synthetic construct
  source 1..20: mol_type = other RNA
atgtgaagcttgagtccctt

SEQ ID NO: 5333 - RNA, 20 nt, synthetic construct
  source 1..20: mol_type = other RNA
ccaaaaatgtgaagcttgag

SEQ ID NO: 5334 - RNA, 20 nt, synthetic construct
  source 1..20: mol_type = other RNA
aacagccaaaaatgtgaagc

SEQ ID NO: 5335 - RNA, 20 nt, synthetic construct
  source 1..20: mol_type = other RNA
ttcataaacagccaaaaatg

SEQ ID NO: 5336 - RNA, 20 nt, synthetic construct
  source 1..20: mol_type = other RNA
ttgccttcataaacagccaa

SEQ ID NO: 5337 - RNA, 20 nt, synthetic construct
  source 1..20: mol_type = other RNA
agacatttgccttcataaac

SEQ ID NO: 5338 - RNA, 20 nt, synthetic construct
  source 1..20: mol_type = other RNA
atgggaagacatttgccttc

SEQ ID NO: 5339 - RNA, 20 nt, synthetic construct
  source 1..20: mol_type = other RNA
tctccatgggaagacatttg

SEQ ID NO: 5340 - RNA, 20 nt, synthetic construct
  source 1..20: mol_type = other RNA
gcatctctccatgggaagac

SEQ ID NO: 5341 - RNA, 20 nt, synthetic construct
  source 1..20: mol_type = other RNA
ctttttgcatctctccatgg

SEQ ID NO: 5342 - RNA, 20 nt, synthetic construct
  source 1..20: mol_type = other RNA
taagaatgtctttttgcatc

SEQ ID NO: 5343 - RNA, 20 nt, synthetic construct
  source 1..20: mol_type = other RNA
ggtctggtaagaatgtcttt

SEQ ID NO: 5344 - RNA, 20 nt, synthetic construct
  source 1..20: mol_type = other RNA
ccaccattggtctggtaaga

SEQ ID NO: 5345 - RNA, 20 nt, synthetic construct
  source 1..20: mol_type = other RNA
agcagccaccattggtctgg

SEQ ID NO: 5346 - RNA, 20 nt, synthetic construct
  source 1..20: mol_type = other RNA
attggagcagccaccattgg

SEQ ID NO: 5347 - RNA, 20 nt, synthetic construct
  source 1..20: mol_type = other RNA
ctcattgggattggagcagc

SEQ ID NO: 5348 - RNA, 20 nt, synthetic construct
  source 1..20: mol_type = other RNA
agccctctcattgggattgg

SEQ ID NO: 5349 - RNA, 20 nt, synthetic construct
  source 1..20: mol_type = other RNA
tctgtcagccctctcattgg

SEQ ID NO: 5350 - RNA, 20 nt, synthetic construct
  source 1..20: mol_type = other RNA
ttatttctgtcagccctctc

SEQ ID NO: 5351 - RNA, 20 nt, synthetic construct
  source 1..20: mol_type = other RNA
ggttattatttctgtcagcc

SEQ ID NO: 5352 - RNA, 20 nt, synthetic construct
  source 1..20: mol_type = other RNA
gaccttggttattatttctg

SEQ ID NO: 5353 - RNA, 20 nt, synthetic construct
  source 1..20: mol_type = other RNA
aaactgaccttggttattat

SEQ ID NO: 5354 - RNA, 20 nt, synthetic construct
  source 1..20: mol_type = other RNA
gttggaaactgaccttggtt

SEQ ID NO: 5355 - RNA, 20 nt, synthetic construct
  source 1..20: mol_type = other RNA
ttttcaggggttggaaactg

SEQ ID NO: 5356 - RNA, 20 nt, synthetic construct
  source 1..20: mol_type = other RNA
gggatttttcaggggttgga

SEQ ID NO: 5357 - RNA, 20 nt, synthetic construct
  source 1..20: mol_type = other RNA
ctgttgggatttttcagggg

SEQ ID NO: 5358 - RNA, 20 nt, synthetic construct
  source 1..20: mol_type = other RNA
gtttcctgttgggatttttc

SEQ ID NO: 5359 - RNA, 20 nt, synthetic construct
  source 1..20: mol_type = other RNA
catctgtggtttcctgttgg

SEQ ID NO: 5360 - RNA, 20 nt, synthetic construct
  source 1..20: mol_type = other RNA
tcgaccatctgtggtttcct

SEQ ID NO: 5361 - RNA, 20 nt, synthetic construct
  source 1..20: mol_type = other RNA
atgacctcgaccatctgtgg

SEQ ID NO: 5362 - RNA, 20 nt, synthetic construct
  source 1..20: mol_type = other RNA
attcagcgcatgacctcgac

SEQ ID NO: 5363 - RNA, 20 nt, synthetic construct
  source 1..20: mol_type = other RNA
cccttttcattcagcgcatg

SEQ ID NO: 5364 - RNA, 20 nt, synthetic construct
  source 1..20: mol_type = other RNA
gaccaaatggcccttttcat

SEQ ID NO: 5365 - RNA, 20 nt, synthetic construct
  source 1..20: mol_type = other RNA
tagctgaccaaatggccctt

SEQ ID NO: 5366 - RNA, 20 nt, synthetic construct
  source 1..20: mol_type = other RNA
tgccatagctgaccaaatgg

SEQ ID NO: 5367 - RNA, 20 nt, synthetic construct
  source 1..20: mol_type = other RNA
caatgatgccatagctgacc

SEQ ID NO: 5368 - RNA, 20 nt, synthetic construct
  source 1..20: mol_type = other RNA
aaaatcaatgatgccatagc

SEQ ID NO: 5369 - RNA, 20 nt, synthetic construct
  source 1..20: mol_type = other RNA
attaataaaatcaatgatgc

SEQ ID NO: 5370 - RNA, 20 nt, synthetic construct
  source 1..20: mol_type = other RNA
ggtttctagtgatattaata

SEQ ID NO: 5371 - RNA, 20 nt, synthetic construct
  source 1..20: mol_type = other RNA
atctttctggtttctagtga

SEQ ID NO: 5372 - RNA, 20 nt, synthetic construct
  source 1..20: mol_type = other RNA
gtgaccaaaatctttctggt

SEQ ID NO: 5373 - RNA, 20 nt, synthetic construct
  source 1..20: mol_type = other RNA
agttttagtgaccaaaatct

SEQ ID NO: 5374 - RNA, 20 nt, synthetic construct
  source 1..20: mol_type = other RNA
caaattcagttttagtgacc

SEQ ID NO: 5375 - RNA, 20 nt, synthetic construct
  source 1..20: mol_type = other RNA
ttgaatgatcaaattcagtt

SEQ ID NO: 5376 - RNA, 20 nt, synthetic construct
  source 1..20: mol_type = other RNA
gatatttgaatgatcaaatt

SEQ ID NO: 5377 - RNA, 20 nt, synthetic construct
  source 1..20: mol_type = other RNA
tcagcaagatatttgaatga

SEQ ID NO: 5378 - RNA, 20 nt, synthetic construct
  source 1..20: mol_type = other RNA
gagactttcagcaagatatt

SEQ ID NO: 5379 - RNA, 20 nt, synthetic construct
  source 1..20: mol_type = other RNA
gaaagactgagactttcagc

SEQ ID NO: 5380 - RNA, 20 nt, synthetic construct
  source 1..20: mol_type = other RNA
tgtttaaaagggaaagactg

SEQ ID NO: 5381 - RNA, 20 nt, synthetic construct
  source 1..20: mol_type = other RNA
gatgggaatgtttaaaaggg

SEQ ID NO: 5382 - RNA, 20 nt, synthetic construct
  source 1..20: mol_type = other RNA
atagagagatgggaatgttt

SEQ ID NO: 5383 - RNA, 20 nt, synthetic construct
  source 1..20: mol_type = other RNA
tagggatagagagatgggaa

SEQ ID NO: 5384 - RNA, 20 nt, synthetic construct
  source 1..20: mol_type = other RNA
ggtgatagggatagagagat

SEQ ID NO: 5385 - RNA, 20 nt, synthetic construct
  source 1..20: mol_type = other RNA
tccaagggtgatagggatag

SEQ ID NO: 5386 - RNA, 20 nt, synthetic construct
  source 1..20: mol_type = other RNA
tgctatccaagggtgatagg

SEQ ID NO: 5387 - RNA, 20 nt, synthetic construct
  source 1..20: mol_type = other RNA
gttaatgctatccaagggtg

SEQ ID NO: 5388 - RNA, 20 nt, synthetic construct
  source 1..20: mol_type = other RNA
aggctgttaatgctatccaa

SEQ ID NO: 5389 - RNA, 20 nt, synthetic construct
  source 1..20: mol_type = other RNA
atctgagaggctgttaatgc

SEQ ID NO: 5390 - RNA, 20 nt, synthetic construct
  source 1..20: mol_type = other RNA
ccaagatctgagaggctgtt

SEQ ID NO: 5391 - RNA, 20 nt, synthetic construct
  source 1..20: mol_type = other RNA
attttccaagatctgagagg

SEQ ID NO: 5392 - RNA, 20 nt, synthetic construct
  source 1..20: mol_type = other RNA
agcaaattttccaagatctg

SEQ ID NO: 5393 - RNA, 20 nt, synthetic construct
  source 1..20: mol_type = other RNA
ggtgcagcaaattttccaag

SEQ ID NO: 5394 - RNA, 20 nt, synthetic construct
  source 1..20: mol_type = other RNA
cccaaggtgcagcaaatttt

SEQ ID NO: 5395 - RNA, 20 nt, synthetic construct
  source 1..20: mol_type = other RNA
ataacatcccaaggtgcagc

SEQ ID NO: 5396 - RNA, 20 nt, synthetic construct
  source 1..20: mol_type = other RNA
gcttgataacatcccaaggt

SEQ ID NO: 5397 - RNA, 20 nt, synthetic construct
  source 1..20: mol_type = other RNA
aagaggcttgataacatccc

SEQ ID NO: 5398 - RNA, 20 nt, synthetic construct
  source 1..20: mol_type = other RNA
caggaaagaggcttgataac

SEQ ID NO: 5399 - RNA, 20 nt, synthetic construct
  source 1..20: mol_type = other RNA
attggctatcaggaaagagg

SEQ ID NO: 5400 - RNA, 20 nt, synthetic construct
  source 1..20: mol_type = other RNA
aaattgattggctatcagga

SEQ ID NO: 5401 - RNA, 20 nt, synthetic construct
  source 1..20: mol_type = other RNA
agaacaaaattgattggcta

SEQ ID NO: 5402 - RNA, 20 nt, synthetic construct
  source 1..20: mol_type = other RNA
ctagattaagaacaaaattg

SEQ ID NO: 5403 - RNA, 20 nt, synthetic construct
  source 1..20: mol_type = other RNA
gctgggaaacctagattaag

SEQ ID NO: 5404 - RNA, 20 nt, synthetic construct
  source 1..20: mol_type = other RNA
gagtaccagctgggaaacct

SEQ ID NO: 5405 - RNA, 20 nt, synthetic construct
  source 1..20: mol_type = other RNA
atcaacactgagtaccagct

SEQ ID NO: 5406 - RNA, 20 nt, synthetic construct
  source 1..20: mol_type = other RNA
aagcctttatcaacactgag

SEQ ID NO: 5407 - RNA, 20 nt, synthetic construct
  source 1..20: mol_type = other RNA
ggtttccaaaagcctttatc

SEQ ID NO: 5408 - RNA, 20 nt, synthetic construct
  source 1..20: mol_type = other RNA
ataagatggtttccaaaagc

SEQ ID NO: 5409 - RNA, 20 nt, synthetic construct
  source 1..20: mol_type = other RNA
gacaaataagatggtttcca

SEQ ID NO: 5410 - RNA, 20 nt, synthetic construct
  source 1..20: mol_type = other RNA
atattagctatgtaaaagaa

SEQ ID NO: 5411 - RNA, 20 nt, synthetic construct
  source 1..20: mol_type = other RNA
gagcaaggatattagctatg

SEQ ID NO: 5412 - RNA, 20 nt, synthetic construct
  source 1..20: mol_type = other RNA
caagacagagcaaggatatt

SEQ ID NO: 5413 - RNA, 20 nt, synthetic construct
  source 1..20: mol_type = other RNA
aaagctttgcaagacagagc

SEQ ID NO: 5414 - RNA, 20 nt, synthetic construct
  source 1..20: mol_type = other RNA
ggcatgaagaaagaaaagct

SEQ ID NO: 5415 - RNA, 20 nt, synthetic construct
  source 1..20: mol_type = other RNA
ttcagcaggcatgaagaaag

SEQ ID NO: 5416 - RNA, 20 nt, synthetic construct
  source 1..20: mol_type = other RNA
gaaaggattcagcaggcatg

SEQ ID NO: 5417 - RNA, 20 nt, synthetic construct
  source 1..20: mol_type = other RNA
cttgaggctgaaaggattca

SEQ ID NO: 5418 - RNA, 20 nt, synthetic construct
  source 1..20: mol_type = other RNA
tagaaccttgaggctgaaag

SEQ ID NO: 5419 - RNA, 20 nt, synthetic construct
  source 1..20: mol_type = other RNA
gtgactagaaccttgaggct

SEQ ID NO: 5420 - RNA, 20 nt, synthetic construct
  source 1..20: mol_type = other RNA
ggtatgtgactagaaccttg

SEQ ID NO: 5421 - RNA, 20 nt, synthetic construct
  source 1..20: mol_type = other RNA
acgagaaggtatgtgactag

SEQ ID NO: 5422 - RNA, 20 nt, synthetic construct
  source 1..20: mol_type = other RNA
gattgatgcacgagaaggta

SEQ ID NO: 5423 - RNA, 20 nt, synthetic construct
  source 1..20: mol_type = other RNA
tacaagattgatgcacgaga

SEQ ID NO: 5424 - RNA, 20 nt, synthetic construct
  source 1..20: mol_type = other RNA
ggattatacaagattgatgc

SEQ ID NO: 5425 - RNA, 20 nt, synthetic construct
  source 1..20: mol_type = other RNA
cttgggggattatacaagat

SEQ ID NO: 5426 - RNA, 20 nt, synthetic construct
  source 1..20: mol_type = other RNA
ttcttcttgggggattatac

SEQ ID NO: 5427 - RNA, 20 nt, synthetic construct
  source 1..20: mol_type = other RNA
gttacttcttcttgggggat

SEQ ID NO: 5428 - RNA, 20 nt, synthetic construct
  source 1..20: mol_type = other RNA
aaggtgttacttcttcttgg

SEQ ID NO: 5429 - RNA, 20 nt, synthetic construct
  source 1..20: mol_type = other RNA
agggagaaaggtgttacttc

SEQ ID NO: 5430 - RNA, 20 nt, synthetic construct
  source 1..20: mol_type = other RNA
aaacacagggagaaaggtgt

SEQ ID NO: 5431 - RNA, 20 nt, synthetic construct
  source 1..20: mol_type = other RNA
gttacggaaacacagggaga

SEQ ID NO: 5432 - RNA, 20 nt, synthetic construct
  source 1..20: mol_type = other RNA
attacagtgttacggaaaca

SEQ ID NO: 5433 - RNA, 20 nt, synthetic construct
  source 1..20: mol_type = other RNA
gattaattacagtgttacgg

SEQ ID NO: 5434 - RNA, 20 nt, synthetic construct
  source 1..20: mol_type = other RNA
tgcacaaggattaattacag

SEQ ID NO: 5435 - RNA, 20 nt, synthetic construct
  source 1..20: mol_type = other RNA
acaaatgcacaaggattaat

SEQ ID NO: 5436 - RNA, 20 nt, synthetic construct
  source 1..20: mol_type = other RNA
cacatacaaatgcacaagga

SEQ ID NO: 5437 - RNA, 20 nt, synthetic construct
  source 1..20: mol_type = other RNA
aattccacacacatacaaat

SEQ ID NO: 5438 - RNA, 20 nt, synthetic construct
  source 1..20: mol_type = other RNA
tgcaataattccacacacat

SEQ ID NO: 5439 - RNA, 20 nt, synthetic construct
  source 1..20: mol_type = other RNA
gcagaatgcaataattccac

SEQ ID NO: 5440 - RNA, 20 nt, synthetic construct
  source 1..20: mol_type = other RNA
ctatatgcagaatgcaataa

SEQ ID NO: 5441 - RNA, 20 nt, synthetic construct
  source 1..20: mol_type = other RNA
atactgcctatatgcagaat

SEQ ID NO: 5442 - RNA, 20 nt, synthetic construct
  source 1..20: mol_type = other RNA
actctatactgcctatatgc

SEQ ID NO: 5443 - RNA, 20 nt, synthetic construct
  source 1..20: mol_type = other RNA
tgcactcttcaccactactc

SEQ ID NO: 5444 - RNA, 20 nt, synthetic construct
  source 1..20: mol_type = other RNA
ttcctagtctggctccagaa

SEQ ID NO: 5445 - RNA, 20 nt, synthetic construct
  source 1..20: mol_type = other RNA
tattcaaattcctagtctgg

SEQ ID NO: 5446 - RNA, 20 nt, synthetic construct
  source 1..20: mol_type = other RNA
gtctgtattcaaattcctag

SEQ ID NO: 5447 - RNA, 20 nt, synthetic construct
  source 1..20: mol_type = other RNA
caagagtctgtattcaaatt

SEQ ID NO: 5448 - RNA, 20 nt, synthetic construct
  source 1..20: mol_type = other RNA
gcccaacaagagtctgtatt

SEQ ID NO: 5449 - RNA, 20 nt, synthetic construct
  source 1..20: mol_type = other RNA
gtaacttgcccaacaagagt

SEQ ID NO: 5450 - RNA, 20 nt, synthetic construct
  source 1..20: mol_type = other RNA
agacaagaaaattgagccac

SEQ ID NO: 5451 - RNA, 20 nt, synthetic construct
  source 1..20: mol_type = other RNA
gttctattattgttcttatt

SEQ ID NO: 5452 - RNA, 20 nt, synthetic construct
  source 1..20: mol_type = other RNA
ggggtaggttctattattgt

SEQ ID NO: 5453 - RNA, 20 nt, synthetic construct
  source 1..20: mol_type = other RNA
ccattggggtaggttctatt

SEQ ID NO: 5454 - RNA, 20 nt, synthetic construct
  source 1..20: mol_type = other RNA
attacccattggggtaggtt

SEQ ID NO: 5455 - RNA, 20 nt, synthetic construct
  source 1..20: mol_type = other RNA
cctcattattacccattggg

SEQ ID NO: 5456 - RNA, 20 nt, synthetic construct
  source 1..20: mol_type = other RNA
cgctactttaatcctcatta

SEQ ID NO: 5457 - RNA, 20 nt, synthetic construct
  source 1..20: mol_type = other RNA
tatattcgctactttaatcc

SEQ ID NO: 5458 - RNA, 20 nt, synthetic construct
  source 1..20: mol_type = other RNA
tttacatatattcgctactt

SEQ ID NO: 5459 - RNA, 20 nt, synthetic construct
  source 1..20: mol_type = other RNA
taggctttacatatattcgc

SEQ ID NO: 5460 - RNA, 20 nt, synthetic construct
  source 1..20: mol_type = other RNA
cgctgtcctataggctttac

SEQ ID NO: 5461 - RNA, 20 nt, synthetic construct
  source 1..20: mol_type = other RNA
atgataggcgctgtcctata

SEQ ID NO: 5462 - RNA, 20 nt, synthetic construct
  source 1..20: mol_type = other RNA
attatatgataggcgctgtc

SEQ ID NO: 5463 - RNA, 20 nt, synthetic construct
  source 1..20: mol_type = other RNA
tgtttattatatgataggcg

SEQ ID NO: 5464 - RNA, 20 nt, synthetic construct
  source 1..20: mol_type = other RNA
catattgtttattatatgat

SEQ ID NO: 5465 - RNA, 20 nt, synthetic construct
  source 1..20: mol_type = other RNA
tcagaactaacacatattgt

SEQ ID NO: 5466 - RNA, 20 nt, synthetic construct
  source 1..20: mol_type = other RNA
gcaaataatcagaactaaca

SEQ ID NO: 5467 - RNA, 20 nt, synthetic construct
  source 1..20: mol_type = other RNA
tgcaagcaaataatcagaac

SEQ ID NO: 5468 - RNA, 20 nt, synthetic construct
  source 1..20: mol_type = other RNA
agaaatgcaagcaaataatc

SEQ ID NO: 5469 - RNA, 20 nt, synthetic construct
  source 1..20: mol_type = other RNA
gggaaataagaaatgcaagc

SEQ ID NO: 5470 - RNA, 20 nt, synthetic construct
  source 1..20: mol_type = other RNA
cgtaggggaaataagaaatg

SEQ ID NO: 5471 - RNA, 20 nt, synthetic construct
  source 1..20: mol_type = other RNA
agcctcgtaggggaaataag

SEQ ID NO: 5472 - RNA, 20 nt, synthetic construct
  source 1..20: mol_type = other RNA
cttacagcctcgtaggggaa

SEQ ID NO: 5473 - RNA, 20 nt, synthetic construct
  source 1..20: mol_type = other RNA
gaggaacttacagcctcgta

SEQ ID NO: 5474 - RNA, 20 nt, synthetic construct
  source 1..20: mol_type = other RNA
gctcttgaggaacttacagc

SEQ ID NO: 5475 - RNA, 20 nt, synthetic construct
  source 1..20: mol_type = other RNA
cttgtgctcttgaggaactt

SEQ ID NO: 5476 - RNA, 20 nt, synthetic construct
  source 1..20: mol_type = other RNA
ttgcacttgtgctcttgagg

SEQ ID NO: 5477 - RNA, 20 nt, synthetic construct
  source 1..20: mol_type = other RNA
attgccttgcacttgtgctc

SEQ ID NO: 5478 - RNA, 20 nt, synthetic construct
  source 1..20: mol_type = other RNA
ggagcaattgccttgcactt

SEQ ID NO: 5479 - RNA, 20 nt, synthetic construct
  source 1..20: mol_type = other RNA
attctggagcaattgccttg

SEQ ID NO: 5480 - RNA, 20 nt, synthetic construct
  source 1..20: mol_type = other RNA
taaatattctggagcaattg

SEQ ID NO: 5481 - RNA, 20 nt, synthetic construct
  source 1..20: mol_type = other RNA
ttcaataaatattctggagc

SEQ ID NO: 5482 - RNA, 20 nt, synthetic construct
  source 1..20: mol_type = other RNA
aggaatatgaatttaatata

SEQ ID NO: 5483 - RNA, 20 nt, synthetic construct
  source 1..20: mol_type = other RNA
ggaaatgttctcaggaatat

SEQ ID NO: 5484 - RNA, 20 nt, synthetic construct
  source 1..20: mol_type = other RNA
gattaaggaaatgttctcag

SEQ ID NO: 5485 - RNA, 20 nt, synthetic construct
  source 1..20: mol_type = other RNA
ctggacaagagattaaggaa

SEQ ID NO: 5486 - RNA, 20 nt, synthetic construct
  source 1..20: mol_type = other RNA
tccaactggacaagagatta

SEQ ID NO: 5487 - RNA, 20 nt, synthetic construct
  source 1..20: mol_type = other RNA
ttcactccaactggacaaga

SEQ ID NO: 5488 - RNA, 20 nt, synthetic construct
  source 1..20: mol_type = other RNA
gctctcttcactccaactgg

SEQ ID NO: 5489 - RNA, 20 nt, synthetic construct
  source 1..20: mol_type = other RNA
gttccaagctctcttcactc

SEQ ID NO: 5490 - RNA, 20 nt, synthetic construct
  source 1..20: mol_type = other RNA
gtttagttccaagctctctt

SEQ ID NO: 5491 - RNA, 20 nt, synthetic construct
  source 1..20: mol_type = other RNA
cttgctgtttagttccaagc

SEQ ID NO: 5492 - RNA, 20 nt, synthetic construct
  source 1..20: mol_type = other RNA
ggttctttcttgctgtttag

SEQ ID NO: 5493 - RNA, 20 nt, synthetic construct
  source 1..20: mol_type = other RNA
tgtcttaggttctttcttgc

SEQ ID NO: 5494 - RNA, 20 nt, synthetic construct
  source 1..20: mol_type = other RNA
gggtgatgtcttaggttctt

SEQ ID NO: 5495 - RNA, 20 nt, synthetic construct
  source 1..20: mol_type = other RNA
tacctgggtgatgtcttagg

SEQ ID NO: 5496 - RNA, 20 nt, synthetic construct
  source 1..20: mol_type = other RNA
acaatggcctaatacctggg

SEQ ID NO: 5497 - RNA, 20 nt, synthetic construct
  source 1..20: mol_type = other RNA
ggaacacaatggcctaatac

SEQ ID NO: 5498 - RNA, 20 nt, synthetic construct
  source 1..20: mol_type = other RNA
ctgctggaacacaatggcct

SEQ ID NO: 5499 - RNA, 20 nt, synthetic construct
  source 1..20: mol_type = other RNA
taaccctgctggaacacaat

SEQ ID NO: 5500 - RNA, 20 nt, synthetic construct
  source 1..20: mol_type = other RNA
ttatctaaccctgctggaac

SEQ ID NO: 5501 - RNA, 20 nt, synthetic construct
  source 1..20: mol_type = other RNA
tgagcagttatctaaccctg

SEQ ID NO: 5502 - RNA, 20 nt, synthetic construct
  source 1..20: mol_type = other RNA
gaccttgagcagttatctaa

SEQ ID NO: 5503 - RNA, 20 nt, synthetic construct
  source 1..20: mol_type = other RNA
ttactgtgaccttgagcagt

SEQ ID NO: 5504 - RNA, 20 nt, synthetic construct
  source 1..20: mol_type = other RNA
gctccttactgtgaccttga

SEQ ID NO: 5505 - RNA, 20 nt, synthetic construct
  source 1..20: mol_type = other RNA
tactctgctccttactgtga

SEQ ID NO: 5506 - RNA, 20 nt, synthetic construct
  source 1..20: mol_type = other RNA
gcacttactctgctccttac

SEQ ID NO: 5507 - RNA, 20 nt, synthetic construct
  source 1..20: mol_type = other RNA
ttccggcacttactctgctc

SEQ ID NO: 5508 - RNA, 20 nt, synthetic construct
  source 1..20: mol_type = other RNA
cctgacttccggcacttact

SEQ ID NO: 5509 - RNA, 20 nt, synthetic construct
  source 1..20: mol_type = other RNA
ggacccctgacttccggcac

SEQ ID NO: 5510 - RNA, 20 nt, synthetic construct
  source 1..20: mol_type = other RNA
tgaaattcaggacccctgac

SEQ ID NO: 5511 - RNA, 20 nt, synthetic construct
  source 1..20: mol_type = other RNA
gcacactgaaattcaggacc

SEQ ID NO: 5512 - RNA, 20 nt, synthetic construct
  source 1..20: mol_type = other RNA
gataaagcacactgaaattc

SEQ ID NO: 5513 - RNA, 20 nt, synthetic construct
  source 1..20: mol_type = other RNA
gtgtagataaagcacactga

SEQ ID NO: 5514 - RNA, 20 nt, synthetic construct
  source 1..20: mol_type = other RNA
ctacagtgtagataaagcac

SEQ ID NO: 5515 - RNA, 20 nt, synthetic construct
  source 1..20: mol_type = other RNA
gtcactctacagtgtagata

SEQ ID NO: 5516 - RNA, 20 nt, synthetic construct
  source 1..20: mol_type = other RNA
aagacagtcactctacagtg

SEQ ID NO: 5517 - RNA, 20 nt, synthetic construct
  source 1..20: mol_type = other RNA
cccctgaaagacagtcactc

SEQ ID NO: 5518 - RNA, 20 nt, synthetic construct
  source 1..20: mol_type = other RNA
gaggtcccctgaaagacagt

SEQ ID NO: 5519 - RNA, 20 nt, synthetic construct
  source 1..20: mol_type = other RNA
tgaattttgaggtcccctga

SEQ ID NO: 5520 - RNA, 20 nt, synthetic construct
  source 1..20: mol_type = other RNA
tctggaaaataatgcctttc

SEQ ID NO: 5521 - RNA, 20 nt, synthetic construct
  source 1..20: mol_type = other RNA
tcaaccgacagtgagcttat

SEQ ID NO: 5522 - RNA, 20 nt, synthetic construct
  source 1..20: mol_type = other RNA
attttagtctattcccagac

SEQ ID NO: 5523 - RNA, 20 nt, synthetic construct
  source 1..20: mol_type = other RNA
ccttccctatcagccatagc

SEQ ID NO: 5524 - RNA, 20 nt, synthetic construct
  source 1..20: mol_type = other RNA
tcaccgtgtatttatttccc

SEQ ID NO: 5525 - RNA, 20 nt, synthetic construct
  source 1..20: mol_type = other RNA
cttacgtggccaatgggatc

SEQ ID NO: 5526 - RNA, 20 nt, synthetic construct
  source 1..20: mol_type = other RNA
ggtgcctctgaagaaaggac

SEQ ID NO: 5527 - RNA, 20 nt, synthetic construct
  source 1..20: mol_type = other RNA
ttagtcctctacctcaacgg

SEQ ID NO: 5528 - RNA, 20 nt, synthetic construct
  source 1..20: mol_type = other RNA
cattctgttttcttcctaag

SEQ ID NO: 5529 - RNA, 20 nt, synthetic construct
  source 1..20: mol_type = other RNA
gtggcagttaactttggtgt

SEQ ID NO: 5530 - RNA, 20 nt, synthetic construct
  source 1..20: mol_type = other RNA
catttagagacaaagaatcg

SEQ ID NO: 5531 - RNA, 20 nt, synthetic construct
  source 1..20: mol_type = other RNA
aagaggaaagaactgtacat

SEQ ID NO: 5532 - RNA, 20 nt, synthetic construct
  source 1..20: mol_type = other RNA
tgttttgcttggtcaagagg

SEQ ID NO: 5533 - RNA, 20 nt, synthetic construct
  source 1..20: mol_type = other RNA
atcaaatactggagttgtgt

SEQ ID NO: 5534 - RNA, 20 nt, synthetic construct
  source 1..20: mol_type = other RNA
aaatgcccaagtttcattgc

SEQ ID NO: 5535 - RNA, 20 nt, synthetic construct
  source 1..20: mol_type = other RNA
aagatgctacaattgccata

SEQ ID NO: 5536 - RNA, 20 nt, synthetic construct
  source 1..20: mol_type = other RNA
ggattaagaagctatttagg

SEQ ID NO: 5537 - RNA, 20 nt, synthetic construct
  source 1..20: mol_type = other RNA
gggatgactcctaaaaatgg

SEQ ID NO: 5538 - RNA, 20 nt, synthetic construct
  source 1..20: mol_type = other RNA
tgtttcctagtaccaagaat

SEQ ID NO: 5539 - RNA, 20 nt, synthetic construct
  source 1..20: mol_type = other RNA
gccccttgaataatttttgt

SEQ ID NO: 5540 - RNA, 20 nt, synthetic construct
  source 1..20: mol_type = other RNA
cccactctagattgcaagcc

SEQ ID NO: 5541 - RNA, 20 nt, synthetic construct
  source 1..20: mol_type = other RNA
gtctaggagcttctgtttac

SEQ ID NO: 5542 - RNA, 20 nt, synthetic construct
  source 1..20: mol_type = other RNA
ttgtctctggttgaagcctc

SEQ ID NO: 5543 - RNA, 20 nt, synthetic construct
  source 1..20: mol_type = other RNA
gctgtgctctgtaacactgt

SEQ ID NO: 5544 - RNA, 20 nt, synthetic construct
  source 1..20: mol_type = other RNA
acccccctcaccttggttcc

SEQ ID NO: 5545 - RNA, 20 nt, synthetic construct
  source 1..20: mol_type = other RNA
ggcaacctcgtcccctcact

SEQ ID NO: 5546 - RNA, 20 nt, synthetic construct
  source 1..20: mol_type = other RNA
ggattaagaagctatttagg

SEQ ID NO: 5547 - RNA, 20 nt, synthetic construct
  source 1..20: mol_type = other RNA
aacttatttatgagctgttg

SEQ ID NO: 5548 - RNA, 20 nt, synthetic construct
  source 1..20: mol_type = other RNA
tattaggagttagtagtggt

SEQ ID NO: 5549 - RNA, 20 nt, synthetic construct
  source 1..20: mol_type = other RNA
gagacaaattatagtggtta

SEQ ID NO: 5550 - RNA, 20 nt, synthetic construct
  source 1..20: mol_type = other RNA
gggaatagctttttagagat

SEQ ID NO: 5551 - RNA, 20 nt, synthetic construct
  source 1..20: mol_type = other RNA
atttgtcaacattttgaggg

SEQ ID NO: 5552 - RNA, 20 nt, synthetic construct
  source 1..20: mol_type = other RNA
tcacacttcagactgggaat

SEQ ID NO: 5553 - RNA, 20 nt, synthetic construct
  source 1..20: mol_type = other RNA
atattgctaatggcttgagc

SEQ ID NO: 5554 - RNA, 20 nt, synthetic construct
  source 1..20: mol_type = other RNA
gtttttaggtcacccaagcc

SEQ ID NO: 5555 - RNA, 20 nt, synthetic construct
  source 1..20: mol_type = other RNA
ttctaggatctaatttcagt

SEQ ID NO: 5556 - RNA, 20 nt, synthetic construct
  source 1..20: mol_type = other RNA
gtggatgcatgtttagaggg

SEQ ID NO: 5557 - RNA, 20 nt, synthetic construct
  source 1..20: mol_type = other RNA
tccaacaccgtactcatttc

SEQ ID NO: 5558 - RNA, 20 nt, synthetic construct
  source 1..20: mol_type = other RNA
gaactacaccgactttatct

SEQ ID NO: 5559 - RNA, 20 nt, synthetic construct
  source 1..20: mol_type = other RNA
ttgaaagctggtttaatgca

SEQ ID NO: 5560 - RNA, 20 nt, synthetic construct
  source 1..20: mol_type = other RNA
gatcacaaattctacccttg

SEQ ID NO: 5561 - RNA, 20 nt, synthetic construct
  source 1..20: mol_type = other RNA
gtttgctctgataatcacag

SEQ ID NO: 5562 - RNA, 20 nt, synthetic construct
  source 1..20: mol_type = other RNA
ttttaacttggctttgtgaa

SEQ ID NO: 5563 - RNA, 20 nt, synthetic construct
  source 1..20: mol_type = other RNA
ctgctcaaagtaaaaatacc

SEQ ID NO: 5564 - RNA, 20 nt, synthetic construct
  source 1..20: mol_type = other RNA
atggccgaatagattgaata

SEQ ID NO: 5565 - RNA, 20 nt, synthetic construct
  source 1..20: mol_type = other RNA
agagtggtgtacatgggtgt

SEQ ID NO: 5566 - RNA, 20 nt, synthetic construct
  source 1..20: mol_type = other RNA
catgtatcaatctcttagag

SEQ ID NO: 5567 - RNA, 20 nt, synthetic construct
  source 1..20: mol_type = other RNA
gtcttctttatagcaatgct

SEQ ID NO: 5568 - RNA, 20 nt, synthetic construct
  source 1..20: mol_type = other RNA
gatgactcttggttgctgtc

SEQ ID NO: 5569 - RNA, 20 nt, synthetic construct
  source 1..20: mol_type = other RNA
cacaacattgtatacaatac

SEQ ID NO: 5570 - RNA, 20 nt, synthetic construct
  source 1..20: mol_type = other RNA
acttacaggatgcattaatg

SEQ ID NO: 5571 - RNA, 20 nt, synthetic construct
  source 1..20: mol_type = other RNA
acgctacaatacttggatag

SEQ ID NO: 5572 - RNA, 20 nt, synthetic construct
  source 1..20: mol_type = other RNA
cttgtccagtgtaaacaacg

SEQ ID NO: 5573 - RNA, 20 nt, synthetic construct
  source 1..20: mol_type = other RNA
gtggagtgtttctggtttat

SEQ ID NO: 5574 - RNA, 20 nt, synthetic construct
  source 1..20: mol_type = other RNA
ttaactcttactttgtggag

SEQ ID NO: 5575 - RNA, 20 nt, synthetic construct
  source 1..20: mol_type = other RNA
atacttgtctctgcaaatcc

SEQ ID NO: 5576 - RNA, 20 nt, synthetic construct
  source 1..20: mol_type = other RNA
tcacaggtaagtaacttata

SEQ ID NO: 5577 - RNA, 20 nt, synthetic construct
  source 1..20: mol_type = other RNA
ggcttcctcaaattcatatt

SEQ ID NO: 5578 - RNA, 20 nt, synthetic construct
  source 1..20: mol_type = other RNA
agtccattatttcctctggc

SEQ ID NO: 5579 - RNA, 20 nt, synthetic construct
  source 1..20: mol_type = other RNA
gaaaccttttaactctccac

SEQ ID NO: 5580 - RNA, 20 nt, synthetic construct
  source 1..20: mol_type = other RNA
cgaggttggaaaaggttgtg

SEQ ID NO: 5581 - RNA, 20 nt, synthetic construct
  source 1..20: mol_type = other RNA
gttcagtgctttagaatgat

SEQ ID NO: 5582 - RNA, 20 nt, synthetic construct
  source 1..20: mol_type = other RNA
gcaaatagataatgttcttg

SEQ ID NO: 5583 - RNA, 20 nt, synthetic construct
  source 1..20: mol_type = other RNA
gggacattgatccttaggca

SEQ ID NO: 5584 - RNA, 20 nt, synthetic construct
  source 1..20: mol_type = other RNA
ctcgtatgtcactgaactgt

SEQ ID NO: 5585 - RNA, 20 nt, synthetic construct
  source 1..20: mol_type = other RNA
ggttattgctctgagtatgt

SEQ ID NO: 5586 - RNA, 20 nt, synthetic construct
  source 1..20: mol_type = other RNA
gtttcccaagcacactctgt

SEQ ID NO: 5587 - RNA, 20 nt, synthetic construct
  source 1..20: mol_type = other RNA
tccaaggcctgttgacaccc

SEQ ID NO: 5588 - RNA, 20 nt, synthetic construct
  source 1..20: mol_type = other RNA
ctctcgttccaaggtgaatc

SEQ ID NO: 5589 - RNA, 20 nt, synthetic construct
  source 1..20: mol_type = other RNA
gcccactctgctcaatttgc

SEQ ID NO: 5590 - RNA, 20 nt, synthetic construct
  source 1..20: mol_type = other RNA
gttgggatagcctgaattcc

SEQ ID NO: 5591 - RNA, 20 nt, synthetic construct
  source 1..20: mol_type = other RNA
acttttcacaactacaggcc

SEQ ID NO: 5592 - RNA, 20 nt, synthetic construct
  source 1..20: mol_type = other RNA
gggaaagtttaaaggtattt

SEQ ID NO: 5593 - RNA, 20 nt, synthetic construct
  source 1..20: mol_type = other RNA
gcaatcttttatattgaggg

SEQ ID NO: 5594 - RNA, 20 nt, synthetic construct
  source 1..20: mol_type = other RNA
agcatctggatcctgcaacc

SEQ ID NO: 5595 - RNA, 20 nt, synthetic construct
  source 1..20: mol_type = other RNA
gtctccacaaaactctatag

SEQ ID NO: 5596 - RNA, 20 nt, synthetic construct
  source 1..20: mol_type = other RNA
caaatgttcttttagggtat

SEQ ID NO: 5597 - RNA, 20 nt, synthetic construct
  source 1..20: mol_type = other RNA
gacttttgagcaaggctgtt

SEQ ID NO: 5598 - RNA, 20 nt, synthetic construct
  source 1..20: mol_type = other RNA
ccagggtgcaagagttgtct

SEQ ID NO: 5599 - RNA, 20 nt, synthetic construct
  source 1..20: mol_type = other RNA
gagcttcatctggtgtgtcc

SEQ ID NO: 5600 - RNA, 20 nt, synthetic construct
  source 1..20: mol_type = other RNA
cgttcatctttgcttataca

SEQ ID NO: 5601 - RNA, 20 nt, synthetic construct
  source 1..20: mol_type = other RNA
ttgaacctttagaaaatcgt

SEQ ID NO: 5602 - RNA, 20 nt, synthetic construct
  source 1..20: mol_type = other RNA
gcttatttgactcaagacct

SEQ ID NO: 5603 - RNA, 20 nt, synthetic construct
  source 1..20: mol_type = other RNA
cagcacaaatatattggagg

SEQ ID NO: 5604 - RNA, 20 nt, synthetic construct
  source 1..20: mol_type = other RNA
gattcacaagaagggagagg

SEQ ID NO: 5605 - RNA, 20 nt, synthetic construct
  source 1..20: mol_type = other RNA
gtaagctcaggcaaaggaga

SEQ ID NO: 5606 - RNA, 20 nt, synthetic construct
  source 1..20: mol_type = other RNA
ggagtgagaggcatttaggg

SEQ ID NO: 5607 - RNA, 20 nt, synthetic construct
  source 1..20: mol_type = other RNA
attcattgctgaaggctgga

SEQ ID NO: 5608 - RNA, 20 nt, synthetic construct
  source 1..20: mol_type = other RNA
gaccaatgttgcctattatt

SEQ ID NO: 5609 - RNA, 20 nt, synthetic construct
  source 1..20: mol_type = other RNA
gcacccaaccaagtcttgac

SEQ ID NO: 5610 - RNA, 20 nt, synthetic construct
  source 1..20: mol_type = other RNA
cctgagattgagctatactg

SEQ ID NO: 5611 - RNA, 20 nt, synthetic construct
  source 1..20: mol_type = other RNA
catctctgtgaatcgctagt

SEQ ID NO: 5612 - RNA, 20 nt, synthetic construct
  source 1..20: mol_type = other RNA
taactgggagtatagaggac

SEQ ID NO: 5613 - RNA, 20 nt, synthetic construct
  source 1..20: mol_type = other RNA
tcacaaatagattgagggtc

SEQ ID NO: 5614 - RNA, 20 nt, synthetic construct
  source 1..20: mol_type = other RNA
gctaatccaaccacttcaac

SEQ ID NO: 5615 - RNA, 20 nt, synthetic construct
  source 1..20: mol_type = other RNA
gtcaagatccccgaagttga

SEQ ID NO: 5616 - RNA, 20 nt, synthetic construct
  source 1..20: mol_type = other RNA
ggactgcgtgactcaggtta

SEQ ID NO: 5617 - RNA, 20 nt, synthetic construct
  source 1..20: mol_type = other RNA
gcaaggtccagggtgtattc

SEQ ID NO: 5618 - RNA, 20 nt, synthetic construct
  source 1..20: mol_type = other RNA
aacatgtcagacagtagttc

SEQ ID NO: 5619 - RNA, 20 nt, synthetic construct
  source 1..20: mol_type = other RNA
cacagagtgccaaggagtta

SEQ ID NO: 5620 - RNA, 20 nt, synthetic construct
  source 1..20: mol_type = other RNA
cgagaaaatgaggtacatgg

SEQ ID NO: 5621 - RNA, 20 nt, synthetic construct
  source 1..20: mol_type = other RNA
gaggttgacaaataggtgtg

SEQ ID NO: 5622 - RNA, 20 nt, synthetic construct
  source 1..20: mol_type = other RNA
gatttaaaggactgcatggc

SEQ ID NO: 5623 - RNA, 20 nt, synthetic construct
  source 1..20: mol_type = other RNA
atggtgagagtgtggttcaa

SEQ ID NO: 5624 - RNA, 20 nt, synthetic construct
  source 1..20: mol_type = other RNA
gcaggatgaagtttacaagg

SEQ ID NO: 5625 - RNA, 20 nt, synthetic construct
  source 1..20: mol_type = other RNA
tggtatccattcacaaggtg

SEQ ID NO: 5626 - RNA, 20 nt, synthetic construct
  source 1..20: mol_type = other RNA
gtactagactctgcctgtgt

SEQ ID NO: 5627 - RNA, 20 nt, synthetic construct
  source 1..20: mol_type = other RNA
ggtgttgagaactagaatat

SEQ ID NO: 5628 - RNA, 20 nt, synthetic construct
  source 1..20: mol_type = other RNA
gtccctgtggttacctaaag

SEQ ID NO: 5629 - RNA, 20 nt, synthetic construct
  source 1..20: mol_type = other RNA
aaggaaggtctagcggaggt

SEQ ID NO: 5630 - RNA, 20 nt, synthetic construct
  source 1..20: mol_type = other RNA
agactttggccaggcaagac

SEQ ID NO: 5631 - RNA, 20 nt, synthetic construct
  source 1..20: mol_type = other RNA
gcatggtagctagtgataat

SEQ ID NO: 5632 - RNA, 20 nt, synthetic construct
  source 1..20: mol_type = other RNA
aaatgttggcccttgaggag

SEQ ID NO: 5633 - RNA, 20 nt, synthetic construct
  source 1..20: mol_type = other RNA
attgtaggtgctgcgggtat

SEQ ID NO: 5634 - RNA, 20 nt, synthetic construct
  source 1..20: mol_type = other RNA
gtgtctatttggtatcagac

SEQ ID NO: 5635 - RNA, 20 nt, synthetic construct
  source 1..20: mol_type = other RNA
gagcacacattcactccatt

SEQ ID NO: 5636 - RNA, 20 nt, synthetic construct
  source 1..20: mol_type = other RNA
tgcattgcatgttgagctgg

SEQ ID NO: 5637 - RNA, 20 nt, synthetic construct
  source 1..20: mol_type = other RNA
gaagaatgggagcaatccgc

SEQ ID NO: 5638 - RNA, 20 nt, synthetic construct
  source 1..20: mol_type = other RNA
gtaggaagttgaatgagttg

SEQ ID NO: 5639 - RNA, 20 nt, synthetic construct
  source 1..20: mol_type = other RNA
tggatgtagatgaatggcaa

SEQ ID NO: 5640 - RNA, 20 nt, synthetic construct
  source 1..20: mol_type = other RNA
gccacacgtttcttattgcg

SEQ ID NO: 5641 - RNA, 20 nt, synthetic construct
  source 1..20: mol_type = other RNA
gtgggagtggtaagattagc

SEQ ID NO: 5642 - RNA, 20 nt, synthetic construct
  source 1..20: mol_type = other RNA
aacggaagggttaaaggtat

SEQ ID NO: 5643 - RNA, 20 nt, synthetic construct
  source 1..20: mol_type = other RNA
gtgaggcatcaggtaagttc

SEQ ID NO: 5644 - RNA, 20 nt, synthetic construct
  source 1..20: mol_type = other RNA
gcgggattagatgaggtcta

SEQ ID NO: 5645 - RNA, 20 nt, synthetic construct
  source 1..20: mol_type = other RNA
gcccaaatgaggtgatacaa

SEQ ID NO: 5646 - RNA, 20 nt, synthetic construct
  source 1..20: mol_type = other RNA
atgacatgatagcacccaac

SEQ ID NO: 5647 - RNA, 20 nt, synthetic construct
  source 1..20: mol_type = other RNA
cttaggaggattatttaacc

SEQ ID NO: 5648 - RNA, 20 nt, synthetic construct
  source 1..20: mol_type = other RNA
ctactagttgttacacctta

SEQ ID NO: 5649 - RNA, 20 nt, synthetic construct
  source 1..20: mol_type = other RNA
agactggcatgtggcttcac

SEQ ID NO: 5650 - RNA, 20 nt, synthetic construct
  source 1..20: mol_type = other RNA
ggaagaaggttagcacagac

SEQ ID NO: 5651 - RNA, 20 nt, synthetic construct
  source 1..20: mol_type = other RNA
gcatttcagagcacagagtg

SEQ ID NO: 5652 - RNA, 20 nt, synthetic construct
  source 1..20: mol_type = other RNA
cactggcccatcaattgcat

SEQ ID NO: 5653 - RNA, 20 nt, synthetic construct
  source 1..20: mol_type = other RNA
tctgcaaattaagaagcact

SEQ ID NO: 5654 - RNA, 20 nt, synthetic construct
  source 1..20: mol_type = other RNA
cagagaaacctaaaattgag

SEQ ID NO: 5655 - RNA, 20 nt, synthetic construct
  source 1..20: mol_type = other RNA
acccacatagttgtactctc

SEQ ID NO: 5656 - RNA, 20 nt, synthetic construct
  source 1..20: mol_type = other RNA
gcttgtgatgtccagatgac

SEQ ID NO: 5657 - RNA, 20 nt, synthetic construct
  source 1..20: mol_type = other RNA
gagcatcaggtaccatgaca

SEQ ID NO: 5658 - RNA, 20 nt, synthetic construct
  source 1..20: mol_type = other RNA
ctgggatagggtggatctac

SEQ ID NO: 5659 - RNA, 20 nt, synthetic construct
  source 1..20: mol_type = other RNA
gtggagcaaactaggcactg

SEQ ID NO: 5660 - RNA, 20 nt, synthetic construct
  source 1..20: mol_type = other RNA
gagccctacccagacatgat

SEQ ID NO: 5661 - RNA, 20 nt, synthetic construct
  source 1..20: mol_type = other RNA
taaatggcccacaagtgagg

SEQ ID NO: 5662 - RNA, 20 nt, synthetic construct
  source 1..20: mol_type = other RNA
atgaagtgttgtatgtgccc

SEQ ID NO: 5663 - RNA, 20 nt, synthetic construct
  source 1..20: mol_type = other RNA
actttcgtccttaagatcat

SEQ ID NO: 5664 - RNA, 20 nt, synthetic construct
  source 1..20: mol_type = other RNA
acattggacttactcaactc

SEQ ID NO: 5665 - RNA, 20 nt, synthetic construct
  source 1..20: mol_type = other RNA
tggcgttattaattctacag

SEQ ID NO: 5666 - RNA, 20 nt, synthetic construct
  source 1..20: mol_type = other RNA
tgctaggattgtaattagtc

SEQ ID NO: 5667 - RNA, 20 nt, synthetic construct
  source 1..20: mol_type = other RNA
gagtgctgtggagatcaatg

SEQ ID NO: 5668 - RNA, 20 nt, synthetic construct
  source 1..20: mol_type = other RNA
tgcttatgaatgaagtccat

SEQ ID NO: 5669 - RNA, 20 nt, synthetic construct
  source 1..20: mol_type = other RNA
acaagaactaccgcactcaa

SEQ ID NO: 5670 - RNA, 20 nt, synthetic construct
  source 1..20: mol_type = other RNA
tttatgcacaataatgagcc

SEQ ID NO: 5671 - RNA, 20 nt, synthetic construct
  source 1..20: mol_type = other RNA
ggcaattataaaggtaccct

SEQ ID NO: 5672 - RNA, 20 nt, synthetic construct
  source 1..20: mol_type = other RNA
gccccttgcgagtgataaat

SEQ ID NO: 5673 - RNA, 20 nt, synthetic construct
  source 1..20: mol_type = other RNA
aatccaatctacccataccc

SEQ ID NO: 5674 - RNA, 20 nt, synthetic construct
  source 1..20: mol_type = other RNA
tccacgactgaaacatgact

SEQ ID NO: 5675 - RNA, 20 nt, synthetic construct
  source 1..20: mol_type = other RNA
gtgttcacttactagctatc

SEQ ID NO: 5676 - RNA, 20 nt, synthetic construct
  source 1..20: mol_type = other RNA
gtgtctgggaggtttagtta

SEQ ID NO: 5677 - RNA, 20 nt, synthetic construct
  source 1..20: mol_type = other RNA
gaggactgtgccacataacc

SEQ ID NO: 5678 - RNA, 20 nt, synthetic construct
  source 1..20: mol_type = other RNA
caatcctggaagtggcatcc

SEQ ID NO: 5679 - RNA, 20 nt, synthetic construct
  source 1..20: mol_type = other RNA
atatggagcattttgtatgg

SEQ ID NO: 5680 - RNA, 20 nt, synthetic construct
  source 1..20: mol_type = other RNA
ttaaggtctccttggacatg

SEQ ID NO: 5681 - RNA, 20 nt, synthetic construct
  source 1..20: mol_type = other RNA
tgacagaagctctaccatcc

SEQ ID NO: 5682 - RNA, 20 nt, synthetic construct
  source 1..20: mol_type = other RNA
cctcatgtgaagtccagtag

SEQ ID NO: 5683 - RNA, 20 nt, synthetic construct
  source 1..20: mol_type = other RNA
ggtagtgatacttgctaatt

SEQ ID NO: 5684 - RNA, 20 nt, synthetic construct
  source 1..20: mol_type = other RNA
cttgttggatgatttggtta

SEQ ID NO: 5685 - RNA, 20 nt, synthetic construct
  source 1..20: mol_type = other RNA
ttagttgactgcagagggag

SEQ ID NO: 5686 - RNA, 20 nt, synthetic construct
  source 1..20: mol_type = other RNA
gaaggacacaatttctgtag

SEQ ID NO: 5687 - RNA, 20 nt, synthetic construct
  source 1..20: mol_type = other RNA
gctttcttaggtagcttatg

SEQ ID NO: 5688 - RNA, 20 nt, synthetic construct
  source 1..20: mol_type = other RNA
tttgtggcatagagactagc

SEQ ID NO: 5689 - RNA, 20 nt, synthetic construct
  source 1..20: mol_type = other RNA
gtgtaaagccagcatgagtc

SEQ ID NO: 5690 - RNA, 20 nt, synthetic construct
  source 1..20: mol_type = other RNA
ttattaccaccctgaaaatc

SEQ ID NO: 5691 - RNA, 20 nt, synthetic construct
  source 1..20: mol_type = other RNA
gcacaccaatcacagaagct

SEQ ID NO: 5692 - RNA, 20 nt, synthetic construct
  source 1..20: mol_type = other RNA
gatgggttaggcaggaagtc

SEQ ID NO: 5693 - RNA, 20 nt, synthetic construct
  source 1..20: mol_type = other RNA
aacttctgttcacggccacc

SEQ ID NO: 5694 - RNA, 20 nt, synthetic construct
  source 1..20: mol_type = other RNA
agtgccagtaggatgagttg

SEQ ID NO: 5695 - RNA, 20 nt, synthetic construct
  source 1..20: mol_type = other RNA
gaccaggtcataaatacagc

SEQ ID NO: 5696 - RNA, 20 nt, synthetic construct
  source 1..20: mol_type = other RNA
ggaaggacttgagttatatc

SEQ ID NO: 5697 - RNA, 20 nt, synthetic construct
  source 1..20: mol_type = other RNA
aaaagtgacccatcagtatg

SEQ ID NO: 5698 - RNA, 20 nt, synthetic construct
  source 1..20: mol_type = other RNA
tgtttgatgcagaccttaag

SEQ ID NO: 5699 - RNA, 20 nt, synthetic construct
  source 1..20: mol_type = other RNA
ttacagttagtgtccttgag

SEQ ID NO: 5700 - RNA, 20 nt, synthetic construct
  source 1..20: mol_type = other RNA
caaatgttacgctggctacc

SEQ ID NO: 5701 - RNA, 20 nt, synthetic construct
  source 1..20: mol_type = other RNA
attgaagattgcactatgga

SEQ ID NO: 5702 - RNA, 20 nt, synthetic construct
  source 1..20: mol_type = other RNA
gtagaattcagccaatagtt

SEQ ID NO: 5703 - RNA, 20 nt, synthetic construct
  source 1..20: mol_type = other RNA
ctgtggaccaatttggaacc

SEQ ID NO: 5704 - RNA, 20 nt, synthetic construct
  source 1..20: mol_type = other RNA
agcctcctcattacccagta

SEQ ID NO: 5705 - RNA, 20 nt, synthetic construct
  source 1..20: mol_type = other RNA
gctctgaaagtgtgactact

SEQ ID NO: 5706 - RNA, 20 nt, synthetic construct
  source 1..20: mol_type = other RNA
tggcgggaatcatggagtgc

SEQ ID NO: 5707 - RNA, 20 nt, synthetic construct
  source 1..20: mol_type = other RNA
ggagtggagtaagcaagact

SEQ ID NO: 5708 - RNA, 20 nt, synthetic construct
  source 1..20: mol_type = other RNA
ctggtgtatgtaaggaagct

SEQ ID NO: 5709 - RNA, 20 nt, synthetic construct
  source 1..20: mol_type = other RNA
ggaacaagtacatgggtatc

SEQ ID NO: 5710 - RNA, 20 nt, synthetic construct
  source 1..20: mol_type = other RNA
taactgggttttatggaagg

SEQ ID NO: 5711 - RNA, 20 nt, synthetic construct
  source 1..20: mol_type = other RNA
tgtcagttagcgtgtgaggg

SEQ ID NO: 5712 - RNA, 20 nt, synthetic construct
  source 1..20: mol_type = other RNA
acgtatgctgtgtgagagag

SEQ ID NO: 5713 - RNA, 20 nt, synthetic construct
  source 1..20: mol_type = other RNA
agggatatgatagggagtgt

SEQ ID NO: 5714 - RNA, 20 nt, synthetic construct
  source 1..20: mol_type = other RNA
atggtgtaaatggtatggag

SEQ ID NO: 5715 - RNA, 20 nt, synthetic construct
  source 1..20: mol_type = other RNA
gtttagttgactgcagaggg

SEQ ID NO: 5716 - RNA, 20 nt, synthetic construct
  source 1..20: mol_type = other RNA
tagtttagttgactgcagag

SEQ ID NO: 5717 - RNA, 20 nt, synthetic construct
  source 1..20: mol_type = other RNA
ttctgtagtttagttgactg

SEQ ID NO: 5718 - RNA, 20 nt, synthetic construct
  source 1..20: mol_type = other RNA
aggacacaatttctgtagtt

SEQ ID NO: 5719 - RNA, 20 nt, synthetic construct
  source 1..20: mol_type = other RNA
gaaggacacaatttctgtag

SEQ ID NO: 5720 - RNA, 20 nt, synthetic construct
  source 1..20: mol_type = other RNA
tggaaggacacaatttctgt

SEQ ID NO: 5721 - RNA, 20 nt, synthetic construct
  source 1..20: mol_type = other RNA
agcaagctgtgtggaaggac

SEQ ID NO: 5722 - RNA, 20 nt, synthetic construct
  source 1..20: mol_type = other RNA
taaagcaagctgtgtggaag

SEQ ID NO: 5723 - RNA, 20 nt, synthetic construct
  source 1..20: mol_type = other RNA
tggcaaggagaggatgagta

SEQ ID NO: 5724 - RNA, 20 nt, synthetic construct
  source 1..20: mol_type = other RNA
atgaatggcaaggagaggat

SEQ ID NO: 5725 - RNA, 20 nt, synthetic construct
  source 1..20: mol_type = other RNA
gatgtagatgaatggcaagg

SEQ ID NO: 5726 - RNA, 20 nt, synthetic construct
  source 1..20: mol_type = other RNA
tggatgtagatgaatggcaa

SEQ ID NO: 5727 - RNA, 20 nt, synthetic construct
  source 1..20: mol_type = other RNA
tgtggatgtagatgaatggc

SEQ ID NO: 5728 - RNA, 20 nt, synthetic construct
  source 1..20: mol_type = other RNA
gggtgtggatgtagatgaat

SEQ ID NO: 5729 - RNA, 20 nt, synthetic construct
  source 1..20: mol_type = other RNA
atgggtgtggatgtagatga

SEQ ID NO: 5730 - RNA, 20 nt, synthetic construct
  source 1..20: mol_type = other RNA
aaatgggtgtggatgtagat

SEQ ID NO: 5731 - RNA, 20 nt, synthetic construct
  source 1..20: mol_type = other RNA
aaaaatgggtgtggatgtag

SEQ ID NO: 5732 - RNA, 20 nt, synthetic construct
  source 1..20: mol_type = other RNA
tgggaagtttaaaaaatggg

SEQ ID NO: 5733 - RNA, 20 nt, synthetic construct
  source 1..20: mol_type = other RNA
ctgaagtggaggtggtggaa

SEQ ID NO: 5734 - RNA, 20 nt, synthetic construct
  source 1..20: mol_type = other RNA
tcctgaagtggaggtggtgg

SEQ ID NO: 5735 - RNA, 20 nt, synthetic construct
  source 1..20: mol_type = other RNA
ggtaagttcctgaagtggag

SEQ ID NO: 5736 - RNA, 20 nt, synthetic construct
  source 1..20: mol_type = other RNA
gaggcatcaggtaagttcct

SEQ ID NO: 5737 - RNA, 20 nt, synthetic construct
  source 1..20: mol_type = other RNA
gtgaggcatcaggtaagttc

SEQ ID NO: 5738 - RNA, 20 nt, synthetic construct
  source 1..20: mol_type = other RNA
aagtgaggcatcaggtaagt

SEQ ID NO: 5739 - RNA, 20 nt, synthetic construct
  source 1..20: mol_type = other RNA
acagaagtgaggcatcaggt

SEQ ID NO: 5740 - RNA, 20 nt, synthetic construct
  source 1..20: mol_type = other RNA
aagacagaagtgaggcatca

SEQ ID NO: 5741 - RNA, 20 nt, synthetic construct
  source 1..20: mol_type = other RNA
agaagacagaagtgaggcat

SEQ ID NO: 5742 - RNA, 20 nt, synthetic construct
  source 1..20: mol_type = other RNA
tgaggtctaatttagaagac

SEQ ID NO: 5743 - RNA, 20 nt, synthetic construct
  source 1..20: mol_type = other RNA
tggatgtagatgaatggcaa

SEQ ID NO: 5744 - RNA, 20 nt, synthetic construct
  source 1..20: mol_type = other RNA
tggatgtagatgaatggcaa

SEQ ID NO: 5745 - RNA, 20 nt, synthetic construct
  source 1..20: mol_type = other RNA
tggatgtagatgaatggcaa

SEQ ID NO: 5746 - RNA, 20 nt, synthetic construct
  source 1..20: mol_type = other RNA
tggatgtagatgaatggcaa

SEQ ID NO: 5747 - RNA, 20 nt, synthetic construct
  source 1..20: mol_type = other RNA
tggatgtagatgaatggcaa

SEQ ID NO: 5748 - RNA, 20 nt, synthetic construct
  source 1..20: mol_type = other RNA
tggatgtagatgaatggcaa

SEQ ID NO: 5749 - RNA, 20 nt, synthetic construct
  source 1..20: mol_type = other RNA
tggatgtagatgaatggcaa

SEQ ID NO: 5750 - RNA, 20 nt, synthetic construct
  source 1..20: mol_type = other RNA
tggatgtagatgaatggcaa

SEQ ID NO: 5751 - RNA, 20 nt, synthetic construct
  source 1..20: mol_type = other RNA
tggatgtagatgaatggcaa

SEQ ID NO: 5752 - RNA, 20 nt, synthetic construct
  source 1..20: mol_type = other RNA
tggatgtagatgaatggcaa

SEQ ID NO: 5753 - RNA, 20 nt, synthetic construct
  source 1..20: mol_type = other RNA
gtgaggcatcaggtaagttc

SEQ ID NO: 5754 - RNA, 20 nt, synthetic construct
  source 1..20: mol_type = other RNA
gtgaggcatcaggtaagttc

SEQ ID NO: 5755 - RNA, 20 nt, synthetic construct
  source 1..20: mol_type = other RNA
gtgaggcatcaggtaagttc

SEQ ID NO: 5756 - RNA, 20 nt, synthetic construct
  source 1..20: mol_type = other RNA
gtgaggcatcaggtaagttc

SEQ ID NO: 5757 - RNA, 20 nt, synthetic construct
  source 1..20: mol_type = other RNA
gtgaggcatcaggtaagttc

SEQ ID NO: 5758 - RNA, 20 nt, synthetic construct
  source 1..20: mol_type = other RNA
gtgaggcatcaggtaagttc

SEQ ID NO: 5759 - RNA, 20 nt, synthetic construct
  source 1..20: mol_type = other RNA
gtgaggcatcaggtaagttc

SEQ ID NO: 5760 - RNA, 20 nt, synthetic construct
  source 1..20: mol_type = other RNA
gtgaggcatcaggtaagttc

SEQ ID NO: 5761 - RNA, 20 nt, synthetic construct
  source 1..20: mol_type = other RNA
gtgaggcatcaggtaagttc

SEQ ID NO: 5762 - RNA, 20 nt, synthetic construct
  source 1..20: mol_type = other RNA
gtgaggcatcaggtaagttc

SEQ ID NO: 5763 - RNA, 22 nt, synthetic construct
  source 1..22: mol_type = other RNA
gtggatgtagatgaatggcaag

SEQ ID NO: 5764 - RNA, 22 nt, synthetic construct
  source 1..22: mol_type = other RNA
gtggatgtagatgaatggcaag

SEQ ID NO: 5765 - RNA, 22 nt, synthetic construct
  source 1..22: mol_type = other RNA
gtggatgtagatgaatggcaag

SEQ ID NO: 5766 - RNA, 22 nt, synthetic construct
  source 1..22: mol_type = other RNA
gtggatgtagatgaatggcaag

SEQ ID NO: 5767 - RNA, 24 nt, synthetic construct
  source 1..24: mol_type = other RNA
tgtggatgtagatgaatggcaagg

SEQ ID NO: 5768 - RNA, 24 nt, synthetic construct
  source 1..24: mol_type = other RNA
tgtggatgtagatgaatggcaagg

SEQ ID NO: 5769 - RNA, 24 nt, synthetic construct
  source 1..24: mol_type = other RNA
tgtggatgtagatgaatggcaagg

SEQ ID NO: 5770 - RNA, 24 nt, synthetic construct
  source 1..24: mol_type = other RNA
tgtggatgtagatgaatggcaagg

SEQ ID NO: 5771 - RNA, 22 nt, synthetic construct
  source 1..22: mol_type = other RNA
agtgaggcatcaggtaagttcc

SEQ ID NO: 5772 - RNA, 22 nt, synthetic construct
  source 1..22: mol_type = other RNA
agtgaggcatcaggtaagttcc

SEQ ID NO: 5773 - RNA, 22 nt, synthetic construct
  source 1..22: mol_type = other RNA
agtgaggcatcaggtaagttcc

SEQ ID NO: 5774 - RNA, 22 nt, synthetic construct
  source 1..22: mol_type = other RNA
agtgaggcatcaggtaagttcc

SEQ ID NO: 5775 - RNA, 24 nt, synthetic construct
  source 1..24: mol_type = other RNA
aagtgaggcatcaggtaagttcct

SEQ ID NO: 5776 - RNA, 24 nt, synthetic construct
  source 1..24: mol_type = other RNA
aagtgaggcatcaggtaagttcct

SEQ ID NO: 5777 - RNA, 24 nt, synthetic construct
  source 1..24: mol_type = other RNA
aagtgaggcatcaggtaagttcct

SEQ ID NO: 5778 - RNA, 24 nt, synthetic construct
  source 1..24: mol_type = other RNA
aagtgaggcatcaggtaagttcct

SEQ ID NO: 5779 - RNA, 20 nt, synthetic construct
  source 1..20: mol_type = other RNA
tggaaaataatgcctttcta

SEQ ID NO: 5780 - RNA, 20 nt, synthetic construct
  source 1..20: mol_type = other RNA
tctggaaaataatgcctttc

SEQ ID NO: 5781 - RNA, 20 nt, synthetic construct
  source 1..20: mol_type = other RNA
cttatctggaaaataatgcc

SEQ ID NO: 5782 - RNA, 20 nt, synthetic construct
  source 1..20: mol_type = other RNA
gcttatctggaaaataatgc

SEQ ID NO: 5783 - RNA, 20 nt, synthetic construct
  source 1..20: mol_type = other RNA
agtgagcttatctggaaaat

SEQ ID NO: 5784 - RNA, 20 nt, synthetic construct
  source 1..20: mol_type = other RNA
acagtgagcttatctggaaa

SEQ ID NO: 5785 - RNA, 20 nt, synthetic construct
  source 1..20: mol_type = other RNA
cgacagtgagcttatctgga

SEQ ID NO: 5786 - RNA, 20 nt, synthetic construct
  source 1..20: mol_type = other RNA
accgacagtgagcttatctg

SEQ ID NO: 5787 - RNA, 20 nt, synthetic construct
  source 1..20: mol_type = other RNA
atcgctgtggcagttaactt

SEQ ID NO: 5788 - RNA, 20 nt, synthetic construct
  source 1..20: mol_type = other RNA
agaatcgctgtggcagttaa

SEQ ID NO: 5789 - RNA, 20 nt, synthetic construct
  source 1..20: mol_type = other RNA
aaagaatcgctgtggcagtt

SEQ ID NO: 5790 - RNA, 20 nt, synthetic construct
  source 1..20: mol_type = other RNA
acaaagaatcgctgtggcag

SEQ ID NO: 5791 - RNA, 20 nt, synthetic construct
  source 1..20: mol_type = other RNA
gagacaaagaatcgctgtgg

SEQ ID NO: 5792 - RNA, 20 nt, synthetic construct
  source 1..20: mol_type = other RNA
ttagagacaaagaatcgctg

SEQ ID NO: 5793 - RNA, 20 nt, synthetic construct
  source 1..20: mol_type = other RNA
catttagagacaaagaatcg

SEQ ID NO: 5794 - RNA, 20 nt, synthetic construct
  source 1..20: mol_type = other RNA
gtacatttagagacaaagaa

SEQ ID NO: 5795 - RNA, 20 nt, synthetic construct
  source 1..20: mol_type = other RNA
ctgtacatttagagacaaag

SEQ ID NO: 5796 - RNA, 20 nt, synthetic construct
  source 1..20: mol_type = other RNA
aactgtacatttagagacaa

SEQ ID NO: 5797 - RNA, 20 nt, synthetic construct
  source 1..20: mol_type = other RNA
ggaaagaactgtacatttag

SEQ ID NO: 5798 - RNA, 20 nt, synthetic construct
  source 1..20: mol_type = other RNA
aagaggaaagaactggccgg

SEQ ID NO: 5799 - RNA, 20 nt, synthetic construct
  source 1..20: mol_type = other RNA
gtcaagaggaaagaactggc

SEQ ID NO: 5800 - RNA, 20 nt, synthetic construct
  source 1..20: mol_type = other RNA
cttggtcaagaggaaagaac

SEQ ID NO: 5801 - RNA, 20 nt, synthetic construct
  source 1..20: mol_type = other RNA
ttgcttggtcaagaggaaag

SEQ ID NO: 5802 - RNA, 20 nt, synthetic construct
  source 1..20: mol_type = other RNA
ttttgcttggtcaagaggaa

SEQ ID NO: 5803 - RNA, 20 nt, synthetic construct
  source 1..20: mol_type = other RNA
tgttttgcttggtcaagagg

SEQ ID NO: 5804 - RNA, 20 nt, synthetic construct
  source 1..20: mol_type = other RNA
tgtgttttgcttggtcaaga

SEQ ID NO: 5805 - RNA, 20 nt, synthetic construct
  source 1..20: mol_type = other RNA
gagttgtgttttgcttggtc

SEQ ID NO: 5806 - RNA, 20 nt, synthetic construct
  source 1..20: mol_type = other RNA
tggagttgtgttttgcttgg

SEQ ID NO: 5807 - RNA, 20 nt, synthetic construct
  source 1..20: mol_type = other RNA
tactggagttgtgttttgct

SEQ ID NO: 5808 - RNA, 20 nt, synthetic construct
  source 1..20: mol_type = other RNA
ttggttccccctgctgtgct

SEQ ID NO: 5809 - RNA, 20 nt, synthetic construct
  source 1..20: mol_type = other RNA
accttggttccccctgctgt

SEQ ID NO: 5810 - RNA, 20 nt, synthetic construct
  source 1..20: mol_type = other RNA
tcaccttggttccccctgct

SEQ ID NO: 5811 - RNA, 20 nt, synthetic construct
  source 1..20: mol_type = other RNA
cctcaccttggttccccctg

SEQ ID NO: 5812 - RNA, 20 nt, synthetic construct
  source 1..20: mol_type = other RNA
acccccctcaccttggttcc

SEQ ID NO: 5813 - RNA, 20 nt, synthetic construct
  source 1..20: mol_type = other RNA
tcacccccctcaccttggtt

SEQ ID NO: 5814 - RNA, 20 nt, synthetic construct
  source 1..20: mol_type = other RNA
tgctcacccccctcaccttg

SEQ ID NO: 5815 - RNA, 20 nt, synthetic construct
  source 1..20: mol_type = other RNA
actgctcacccccctcacct

SEQ ID NO: 5816 - RNA, 20 nt, synthetic construct
  source 1..20: mol_type = other RNA
tctggaaaataatgcctttc

SEQ ID NO: 5817 - RNA, 20 nt, synthetic construct
  source 1..20: mol_type = other RNA
tctggaaaataatgcctttc

SEQ ID NO: 5818 - RNA, 20 nt, synthetic construct
  source 1..20: mol_type = other RNA
tctggaaaataatgcctttc

SEQ ID NO: 5819 - RNA, 20 nt, synthetic construct
  source 1..20: mol_type = other RNA
tctggaaaataatgcctttc

SEQ ID NO: 5820 - RNA, 20 nt, synthetic construct
  source 1..20: mol_type = other RNA
tctggaaaataatgcctttc

SEQ ID NO: 5821 - RNA, 20 nt, synthetic construct
  source 1..20: mol_type = other RNA
tctggaaaataatgcctttc

SEQ ID NO: 5822 - RNA, 20 nt, synthetic construct
  source 1..20: mol_type = other RNA
tctggaaaataatgcctttc

SEQ ID NO: 5823 - RNA, 20 nt, synthetic construct
  source 1..20: mol_type = other RNA
tctggaaaataatgcctttc

SEQ ID NO: 5824 - RNA, 20 nt, synthetic construct
  source 1..20: mol_type = other RNA
tctggaaaataatgcctttc

SEQ ID NO: 5825 - RNA, 20 nt, synthetic construct
  source 1..20: mol_type = other RNA
tctggaaaataatgcctttc

SEQ ID NO: 5826 - RNA, 20 nt, synthetic construct
  source 1..20: mol_type = other RNA
catttagagacaaagaatcg

SEQ ID NO: 5827 - RNA, 20 nt, synthetic construct
  source 1..20: mol_type = other RNA
catttagagacaaagaatcg

SEQ ID NO: 5828 - RNA, 20 nt, synthetic construct
  source 1..20: mol_type = other RNA
catttagagacaaagaatcg

SEQ ID NO: 5829 - RNA, 20 nt, synthetic construct
  source 1..20: mol_type = other RNA
catttagagacaaagaatcg

SEQ ID NO: 5830 - RNA, 20 nt, synthetic construct
  source 1..20: mol_type = other RNA
catttagagacaaagaatcg

SEQ ID NO: 5831 - RNA, 20 nt, synthetic construct
  source 1..20: mol_type = other RNA
catttagagacaaagaatcg

SEQ ID NO: 5832 - RNA, 20 nt, synthetic construct
  source 1..20: mol_type = other RNA
catttagagacaaagaatcg

SEQ ID NO: 5833 - RNA, 20 nt, synthetic construct
  source 1..20: mol_type = other RNA
catttagagacaaagaatcg

SEQ ID NO: 5834 - RNA, 20 nt, synthetic construct
  source 1..20: mol_type = other RNA
catttagagacaaagaatcg

SEQ ID NO: 5835 - RNA, 20 nt, synthetic construct
  source 1..20: mol_type = other RNA
catttagagacaaagaatcg

SEQ ID NO: 5836 - RNA, 20 nt, synthetic construct
  source 1..20: mol_type = other RNA
tgttttgcttggtcaagagg

SEQ ID NO: 5837 - RNA, 20 nt, synthetic construct
  source 1..20: mol_type = other RNA
tgttttgcttggtcaagagg

SEQ ID NO: 5838 - RNA, 20 nt, synthetic construct
  source 1..20: mol_type = other RNA
tgttttgcttggtcaagagg

SEQ ID NO: 5839 - RNA, 20 nt, synthetic construct
  source 1..20: mol_type = other RNA
tgttttgcttggtcaagagg

SEQ ID NO: 5840 - RNA, 20 nt, synthetic construct
  source 1..20: mol_type = other RNA
tgttttgcttggtcaagagg

SEQ ID NO: 5841 - RNA, 20 nt, synthetic construct
  source 1..20: mol_type = other RNA
tgttttgcttggtcaagagg

SEQ ID NO: 5842 - RNA, 20 nt, synthetic construct
  source 1..20: mol_type = other RNA
tgttttgcttggtcaagagg

SEQ ID NO: 5843 - RNA, 20 nt, synthetic construct
  source 1..20: mol_type = other RNA
tgttttgcttggtcaagagg

SEQ ID NO: 5844 - RNA, 20 nt, synthetic construct
  source 1..20: mol_type = other RNA
tgttttgcttggtcaagagg

SEQ ID NO: 5845 - RNA, 20 nt, synthetic construct
  source 1..20: mol_type = other RNA
tgttttgcttggtcaagagg

SEQ ID NO: 5846 - RNA, 20 nt, synthetic construct
  source 1..20: mol_type = other RNA
acccccctcaccttggttcc

SEQ ID NO: 5847 - RNA, 20 nt, synthetic construct
  source 1..20: mol_type = other RNA
acccccctcaccttggttcc

SEQ ID NO: 5848 - RNA, 20 nt, synthetic construct
  source 1..20: mol_type = other RNA
acccccctcaccttggttcc

SEQ ID NO: 5849 - RNA, 20 nt, synthetic construct
  source 1..20: mol_type = other RNA
acccccctcaccttggttcc

SEQ ID NO: 5850 - RNA, 20 nt, synthetic construct
  source 1..20: mol_type = other RNA
acccccctcaccttggttcc

SEQ ID NO: 5851 - RNA, 20 nt, synthetic construct
  source 1..20: mol_type = other RNA
acccccctcaccttggttcc

SEQ ID NO: 5852 - RNA, 20 nt, synthetic construct
  source 1..20: mol_type = other RNA
acccccctcaccttggttcc

SEQ ID NO: 5853 - RNA, 20 nt, synthetic construct
  source 1..20: mol_type = other RNA
acccccctcaccttggttcc

SEQ ID NO: 5854 - RNA, 20 nt, synthetic construct
  source 1..20: mol_type = other RNA
acccccctcaccttggttcc

SEQ ID NO: 5855 - RNA, 20 nt, synthetic construct
  source 1..20: mol_type = other RNA
acccccctcaccttggttcc

SEQ ID NO: 5856 - RNA, 22 nt, synthetic construct
  source 1..22: mol_type = other RNA
atctggaaaataatgcctttct

SEQ ID NO: 5857 - RNA, 22 nt, synthetic construct
  source 1..22: mol_type = other RNA
atctggaaaataatgcctttct

SEQ ID NO: 5858 - RNA, 22 nt, synthetic construct
  source 1..22: mol_type = other RNA
atctggaaaataatgcctttct

SEQ ID NO: 5859 - RNA, 22 nt, synthetic construct
  source 1..22: mol_type = other RNA
atctggaaaataatgcctttct

SEQ ID NO: 5860 - RNA, 24 nt, synthetic construct
  source 1..24: mol_type = other RNA
tatctggaaaataatgcctttcta

SEQ ID NO: 5861 - RNA, 24 nt, synthetic construct
  source 1..24: mol_type = other RNA
tatctggaaaataatgcctttcta

SEQ ID NO: 5862 - RNA, 24 nt, synthetic construct
  source 1..24: mol_type = other RNA
tatctggaaaataatgcctttcta

SEQ ID NO: 5863 - RNA, 24 nt, synthetic construct
  source 1..24: mol_type = other RNA
tatctggaaaataatgcctttcta

SEQ ID NO: 5864 - RNA, 22 nt, synthetic construct
  source 1..22: mol_type = other RNA
acatttagagacaaagaatcgc

SEQ ID NO: 5865 - RNA, 22 nt, synthetic construct
  source 1..22: mol_type = other RNA
acatttagagacaaagaatcgc

SEQ ID NO: 5866 - RNA, 22 nt, synthetic construct
  source 1..22: mol_type = other RNA
acatttagagacaaagaatcgc

SEQ ID NO: 5867 - RNA, 22 nt, synthetic construct
  source 1..22: mol_type = other RNA
acatttagagacaaagaatcgc

SEQ ID NO: 5868 - RNA, 24 nt, synthetic construct
  source 1..24: mol_type = other RNA
tacatttagagacaaagaatcgct

SEQ ID NO: 5869 - RNA, 24 nt, synthetic construct
  source 1..24: mol_type = other RNA
tacatttagagacaaagaatcgct

SEQ ID NO: 5870 - RNA, 24 nt, synthetic construct
  source 1..24: mol_type = other RNA
tacatttagagacaaagaatcgct

SEQ ID NO: 5871 - RNA, 24 nt, synthetic construct
  source 1..24: mol_type = other RNA
tacatttagagacaaagaatcgct

SEQ ID NO: 5872 - RNA, 22 nt, synthetic construct
  source 1..22: mol_type = other RNA
gtgttttgcttggtcaagagga

SEQ ID NO: 5873 - RNA, 22 nt, synthetic construct
  source 1..22: mol_type = other RNA
gtgttttgcttggtcaagagga

SEQ ID NO: 5874 - RNA, 22 nt, synthetic construct
  source 1..22: mol_type = other RNA
gtgttttgcttggtcaagagga

SEQ ID NO: 5875 - RNA, 22 nt, synthetic construct
  source 1..22: mol_type = other RNA
gtgttttgcttggtcaagagga

SEQ ID NO: 5876 - RNA, 24 nt, synthetic construct
  source 1..24: mol_type = other RNA
tgtgttttgcttggtcaagaggaa

SEQ ID NO: 5877 - RNA, 24 nt, synthetic construct
  source 1..24: mol_type = other RNA
tgtgttttgcttggtcaagaggaa

SEQ ID NO: 5878 - RNA, 24 nt, synthetic construct
  source 1..24: mol_type = other RNA
tgtgttttgcttggtcaagaggaa

SEQ ID NO: 5879 - RNA, 24 nt, synthetic construct
  source 1..24: mol_type = other RNA
tgtgttttgcttggtcaagaggaa

SEQ ID NO: 5880 - RNA, 22 nt, synthetic construct
  source 1..22: mol_type = other RNA
cacccccctcaccttggttccc

SEQ ID NO: 5881 - RNA, 22 nt, synthetic construct
  source 1..22: mol_type = other RNA
cacccccctcaccttggttccc

SEQ ID NO: 5882 - RNA, 22 nt, synthetic construct
  source 1..22: mol_type = other RNA
cacccccctcaccttggttccc

SEQ ID NO: 5883 - RNA, 22 nt, synthetic construct
  source 1..22: mol_type = other RNA
cacccccctcaccttggttccc

SEQ ID NO: 5884 - RNA, 24 nt, synthetic construct
  source 1..24: mol_type = other RNA
tcacccccctcaccttggttcccc

SEQ ID NO: 5885 - RNA, 24 nt, synthetic construct
  source 1..24: mol_type = other RNA
tcacccccctcaccttggttcccc

SEQ ID NO: 5886 - RNA, 24 nt, synthetic construct
  source 1..24: mol_type = other RNA
tcacccccctcaccttggttcccc

SEQ ID NO: 5887 - RNA, 24 nt, synthetic construct
  source 1..24: mol_type = other RNA
tcacccccctcaccttggttcccc

SEQ ID NO: 5888 - RNA, 20 nt, synthetic construct
  source 1..20: mol_type = other RNA
ttaggaggattatttaacct

SEQ ID NO: 5889 - RNA, 20 nt, synthetic construct
  source 1..20: mol_type = other RNA
cttaggaggattatttaacc

SEQ ID NO: 5890 - RNA, 20 nt, synthetic construct
  source 1..20: mol_type = other RNA
ccttaggaggattatttaac

SEQ ID NO: 5891 - RNA, 20 nt, synthetic construct
  source 1..20: mol_type = other RNA
acaccttaggaggattattt

SEQ ID NO: 5892 - RNA, 20 nt, synthetic construct
  source 1..20: mol_type = other RNA
ttacaccttaggaggattat

SEQ ID NO: 5893 - RNA, 20 nt, synthetic construct
  source 1..20: mol_type = other RNA
tgttacaccttaggaggatt

SEQ ID NO: 5894 - RNA, 20 nt, synthetic construct
  source 1..20: mol_type = other RNA
tagttgttacaccttaggag

SEQ ID NO: 5895 - RNA, 20 nt, synthetic construct
  source 1..20: mol_type = other RNA
actagttgttacaccttagg

SEQ ID NO: 5896 - RNA, 20 nt, synthetic construct
  source 1..20: mol_type = other RNA
cttaggaggattatttaacc

SEQ ID NO: 5897 - RNA, 20 nt, synthetic construct
  source 1..20: mol_type = other RNA
cttaggaggattatttaacc

SEQ ID NO: 5898 - RNA, 20 nt, synthetic construct
  source 1..20: mol_type = other RNA
cttaggaggattatttaacc

SEQ ID NO: 5899 - RNA, 20 nt, synthetic construct
  source 1..20: mol_type = other RNA
cttaggaggattatttaacc

SEQ ID NO: 5900 - RNA, 20 nt, synthetic construct
  source 1..20: mol_type = other RNA
cttaggaggattatttaacc

SEQ ID NO: 5901 - RNA, 20 nt, synthetic construct
  source 1..20: mol_type = other RNA
cttaggaggattatttaacc

SEQ ID NO: 5902 - RNA, 20 nt, synthetic construct
  source 1..20: mol_type = other RNA
cttaggaggattatttaacc

SEQ ID NO: 5903 - RNA, 20 nt, synthetic construct
  source 1..20: mol_type = other RNA
cttaggaggattatttaacc

SEQ ID NO: 5904 - RNA, 20 nt, synthetic construct
  source 1..20: mol_type = other RNA
cttaggaggattatttaacc

SEQ ID NO: 5905 - RNA, 20 nt, synthetic construct
  source 1..20: mol_type = other RNA
cttaggaggattatttaacc

SEQ ID NO: 5906 - RNA, 22 nt, synthetic construct
  source 1..22: mol_type = other RNA
ccttaggaggattatttaacct

SEQ ID NO: 5907 - RNA, 22 nt, synthetic construct
  source 1..22: mol_type = other RNA
ccttaggaggattatttaacct

SEQ ID NO: 5908 - RNA, 22 nt, synthetic construct
  source 1..22: mol_type = other RNA
ccttaggaggattatttaacct

SEQ ID NO: 5909 - RNA, 22 nt, synthetic construct
  source 1..22: mol_type = other RNA
ccttaggaggattatttaacct

SEQ ID NO: 5910 - RNA, 24 nt, synthetic construct
  source 1..24: mol_type = other RNA
accttaggaggattatttaacctc

SEQ ID NO: 5911 - RNA, 24 nt, synthetic construct
  source 1..24: mol_type = other RNA
accttaggaggattatttaacctc

SEQ ID NO: 5912 - RNA, 24 nt, synthetic construct
  source 1..24: mol_type = other RNA
accttaggaggattatttaacctc

SEQ ID NO: 5913 - RNA, 24 nt, synthetic construct
  source 1..24: mol_type = other RNA
accttaggaggattatttaacctc

SEQ ID NO: 5914 - RNA, 20 nt, synthetic construct
  source 1..20: mol_type = other RNA
ggagcaaactaggcactgag

SEQ ID NO: 5915 - RNA, 20 nt, synthetic construct
  source 1..20: mol_type = other RNA
gtggagcaaactaggcactg

SEQ ID NO: 5916 - RNA, 20 nt, synthetic construct
  source 1..20: mol_type = other RNA
aggtggagcaaactaggcac

SEQ ID NO: 5917 - RNA, 20 nt, synthetic construct
  source 1..20: mol_type = other RNA
ggaggtggagcaaactaggc

SEQ ID NO: 5918 - RNA, 20 nt, synthetic construct
  source 1..20: mol_type = other RNA
tgtggaggtggagcaaacta

SEQ ID NO: 5919 - RNA, 20 nt, synthetic construct
  source 1..20: mol_type = other RNA
gatgtggaggtggagcaaac

SEQ ID NO: 5920 - RNA, 20 nt, synthetic construct
  source 1..20: mol_type = other RNA
atgatgtggaggtggagcaa

SEQ ID NO: 5921 - RNA, 20 nt, synthetic construct
  source 1..20: mol_type = other RNA
cagacatgatgtggaggtgg

SEQ ID NO: 5922 - RNA, 20 nt, synthetic construct
  source 1..20: mol_type = other RNA
attctacagagggagcataa

SEQ ID NO: 5923 - RNA, 20 nt, synthetic construct
  source 1..20: mol_type = other RNA
ttaattctacagagggagca

SEQ ID NO: 5924 - RNA, 20 nt, synthetic construct
  source 1..20: mol_type = other RNA
gttattaattctacagaggg

SEQ ID NO: 5925 - RNA, 20 nt, synthetic construct
  source 1..20: mol_type = other RNA
ggcgttattaattctacaga

SEQ ID NO: 5926 - RNA, 20 nt, synthetic construct
  source 1..20: mol_type = other RNA
tggcgttattaattctacag

SEQ ID NO: 5927 - RNA, 20 nt, synthetic construct
  source 1..20: mol_type = other RNA
ttatttggcgttattaattc

SEQ ID NO: 5928 - RNA, 20 nt, synthetic construct
  source 1..20: mol_type = other RNA
tcttatttggcgttattaat

SEQ ID NO: 5929 - RNA, 20 nt, synthetic construct
  source 1..20: mol_type = other RNA
agtcttatttggcgttatta

SEQ ID NO: 5930 - RNA, 20 nt, synthetic construct
  source 1..20: mol_type = other RNA
ttagtcttatttggcgttat

SEQ ID NO: 5931 - RNA, 20 nt, synthetic construct
  source 1..20: mol_type = other RNA
aattagtcttatttggcgtt

SEQ ID NO: 5932 - RNA, 20 nt, synthetic construct
  source 1..20: mol_type = other RNA
tgtaattagtcttatttggc

SEQ ID NO: 5933 - RNA, 20 nt, synthetic construct
  source 1..20: mol_type = other RNA
gtggagcaaactaggcactg

SEQ ID NO: 5934 - RNA, 20 nt, synthetic construct
  source 1..20: mol_type = other RNA
gtggagcaaactaggcactg

SEQ ID NO: 5935 - RNA, 20 nt, synthetic construct
  source 1..20: mol_type = other RNA
gtggagcaaactaggcactg

SEQ ID NO: 5936 - RNA, 20 nt, synthetic construct
  source 1..20: mol_type = other RNA
gtggagcaaactaggcactg

SEQ ID NO: 5937 - RNA, 20 nt, synthetic construct
  source 1..20: mol_type = other RNA
gtggagcaaactaggcactg

SEQ ID NO: 5938 - RNA, 20 nt, synthetic construct
  source 1..20: mol_type = other RNA
gtggagcaaactaggcactg

SEQ ID NO: 5939 - RNA, 20 nt, synthetic construct
  source 1..20: mol_type = other RNA
gtggagcaaactaggcactg

SEQ ID NO: 5940 - RNA, 20 nt, synthetic construct
  source 1..20: mol_type = other RNA
gtggagcaaactaggcactg

SEQ ID NO: 5941 - RNA, 20 nt, synthetic construct
  source 1..20: mol_type = other RNA
gtggagcaaactaggcactg

SEQ ID NO: 5942 - RNA, 20 nt, synthetic construct
  source 1..20: mol_type = other RNA
gtggagcaaactaggcactg

SEQ ID NO: 5943 - RNA, 20 nt, synthetic construct
  source 1..20: mol_type = other RNA
tggcgttattaattctacag

SEQ ID NO: 5944 - RNA, 20 nt, synthetic construct
  source 1..20: mol_type = other RNA
tggcgttattaattctacag

SEQ ID NO: 5945 - RNA, 20 nt, synthetic construct
  source 1..20: mol_type = other RNA
tggcgttattaattctacag

SEQ ID NO: 5946 - RNA, 20 nt, synthetic construct
  source 1..20: mol_type = other RNA
tggcgttattaattctacag

SEQ ID NO: 5947 - RNA, 20 nt, synthetic construct
  source 1..20: mol_type = other RNA
tggcgttattaattctacag

SEQ ID NO: 5948 - RNA, 20 nt, synthetic construct
  source 1..20: mol_type = other RNA
tggcgttattaattctacag

SEQ ID NO: 5949 - RNA, 20 nt, synthetic construct
  source 1..20: mol_type = other RNA
tggcgttattaattctacag

SEQ ID NO: 5950 - RNA, 20 nt, synthetic construct
  source 1..20: mol_type = other RNA
tggcgttattaattctacag

SEQ ID NO: 5951 - RNA, 20 nt, synthetic construct
  source 1..20: mol_type = other RNA
tggcgttattaattctacag

SEQ ID NO: 5952 - RNA, 20 nt, synthetic construct
  source 1..20: mol_type = other RNA
tggcgttattaattctacag

SEQ ID NO: 5953 - RNA, 22 nt, synthetic construct
  source 1..22: mol_type = other RNA
ggtggagcaaactaggcactga

SEQ ID NO: 5954 - RNA, 22 nt, synthetic construct
  source 1..22: mol_type = other RNA
ggtggagcaaactaggcactga

SEQ ID NO: 5955 - RNA, 22 nt, synthetic construct
  source 1..22: mol_type = other RNA
ggtggagcaaactaggcactga

SEQ ID NO: 5956 - RNA, 22 nt, synthetic construct
  source 1..22: mol_type = other RNA
ggtggagcaaactaggcactga

SEQ ID NO: 5957 - RNA, 24 nt, synthetic construct
  source 1..24: mol_type = other RNA
aggtggagcaaactaggcactgag

SEQ ID NO: 5958 - RNA, 24 nt, synthetic construct
  source 1..24: mol_type = other RNA
aggtggagcaaactaggcactgag

SEQ ID NO: 5959 - RNA, 24 nt, synthetic construct
  source 1..24: mol_type = other RNA
aggtggagcaaactaggcactgag

SEQ ID NO: 5960 - RNA, 24 nt, synthetic construct
  source 1..24: mol_type = other RNA
aggtggagcaaactaggcactgag

SEQ ID NO: 5961 - RNA, 22 nt, synthetic construct
  source 1..22: mol_type = other RNA
ttggcgttattaattctacaga

SEQ ID NO: 5962 - RNA, 22 nt, synthetic construct
  source 1..22: mol_type = other RNA
ttggcgttattaattctacaga

SEQ ID NO: 5963 - RNA, 22 nt, synthetic construct
  source 1..22: mol_type = other RNA
ttggcgttattaattctacaga

SEQ ID NO: 5964 - RNA, 22 nt, synthetic construct
  source 1..22: mol_type = other RNA
ttggcgttattaattctacaga

SEQ ID NO: 5965 - RNA, 24 nt, synthetic construct
  source 1..24: mol_type = other RNA
tttggcgttattaattctacagag

SEQ ID NO: 5966 - RNA, 24 nt, synthetic construct
  source 1..24: mol_type = other RNA
tttggcgttattaattctacagag

SEQ ID NO: 5967 - RNA, 24 nt, synthetic construct
  source 1..24: mol_type = other RNA
tttggcgttattaattctacagag

SEQ ID NO: 5968 - RNA, 24 nt, synthetic construct
  source 1..24: mol_type = other RNA
tttggcgttattaattctacagag

SEQ ID NO: 5969 - RNA, 20 nt, synthetic construct
  source 1..20: mol_type = other RNA
tgttttgcttggtcaagagg

SEQ ID NO: 5970 - RNA, 20 nt, synthetic construct
  source 1..20: mol_type = other RNA
tggcgttattaattctacag

SEQ ID NO: 5971 - RNA, 20 nt, synthetic construct
  source 1..20: mol_type = other RNA
tgttttgcttggtcaagagg

SEQ ID NO: 5972 - RNA, 20 nt, synthetic construct
  source 1..20: mol_type = other RNA
tgttttgcttggtcaagagg

SEQ ID NO: 5973 - RNA, 20 nt, synthetic construct
  source 1..20: mol_type = other RNA
tgttttgcttggtcaagagg

SEQ ID NO: 5974 - RNA, 20 nt, synthetic construct
  source 1..20: mol_type = other RNA
tgttttgcttggtcaagagg

SEQ ID NO: 5975 - RNA, 20 nt, synthetic construct
  source 1..20: mol_type = other RNA
tgttttgcttggtcaagagg

SEQ ID NO: 5976 - RNA, 20 nt, synthetic construct
  source 1..20: mol_type = other RNA
tgttttgcttggtcaagagg

SEQ ID NO: 5977 - RNA, 20 nt, synthetic construct
  source 1..20: mol_type = other RNA
tgttttgcttggtcaagagg

SEQ ID NO: 5978 - RNA, 20 nt, synthetic construct
  source 1..20: mol_type = other RNA
tgttttgcttggtcaagagg

SEQ ID NO: 5979 - RNA, 20 nt, synthetic construct
  source 1..20: mol_type = other RNA
tgttttgcttggtcaagagg

SEQ ID NO: 5980 - RNA, 20 nt, synthetic construct
  source 1..20: mol_type = other RNA
tgttttgcttggtcaagagg

SEQ ID NO: 5981 - RNA, 20 nt, synthetic construct
  source 1..20: mol_type = other RNA
gtggagcaaactaggcactg

SEQ ID NO: 5982 - RNA, 20 nt, synthetic construct
  source 1..20: mol_type = other RNA
gtggagcaaactaggcactg

SEQ ID NO: 5983 - RNA, 20 nt, synthetic construct
  source 1..20: mol_type = other RNA
gtggagcaaactaggcactg

SEQ ID NO: 5984 - RNA, 20 nt, synthetic construct
  source 1..20: mol_type = other RNA
gtggagcaaactaggcactg

SEQ ID NO: 5985 - RNA, 20 nt, synthetic construct
  source 1..20: mol_type = other RNA
gtggagcaaactaggcactg

SEQ ID NO: 5986 - RNA, 20 nt, synthetic construct
  source 1..20: mol_type = other RNA
gtggagcaaactaggcactg

SEQ ID NO: 5987 - RNA, 20 nt, synthetic construct
  source 1..20: mol_type = other RNA
gtggagcaaactaggcactg

SEQ ID NO: 5988 - RNA, 20 nt, synthetic construct
  source 1..20: mol_type = other RNA
gtggagcaaactaggcactg

SEQ ID NO: 5989 - RNA, 20 nt, synthetic construct
  source 1..20: mol_type = other RNA
gtggagcaaactaggcactg

SEQ ID NO: 5990 - RNA, 20 nt, synthetic construct
  source 1..20: mol_type = other RNA
gtggagcaaactaggcactg

SEQ ID NO: 5991 - RNA, 20 nt, synthetic construct
  source 1..20: mol_type = other RNA
gtggagcaaactaggcactg

SEQ ID NO: 5992 - RNA, 20 nt, synthetic construct
  source 1..20: mol_type = other RNA
gtggagcaaactaggcactg

SEQ ID NO: 5993 - RNA, 20 nt, synthetic construct
  source 1..20: mol_type = other RNA
gtggagcaaactaggcactg

SEQ ID NO: 5994 - RNA, 20 nt, synthetic construct
  source 1..20: mol_type = other RNA
gtggagcaaactaggcactg

SEQ ID NO: 5995 - RNA, 20 nt, synthetic construct
  source 1..20: mol_type = other RNA
gtggagcaaactaggcactg

SEQ ID NO: 5996 - RNA, 20 nt, synthetic construct
  source 1..20: mol_type = other RNA
gtggagcaaactaggcactg

SEQ ID NO: 5997 - RNA, 20 nt, synthetic construct
  source 1..20: mol_type = other RNA
gtggagcaaactaggcactg

SEQ ID NO: 5998 - RNA, 20 nt, synthetic construct
  source 1..20: mol_type = other RNA
gtggagcaaactaggcactg

SEQ ID NO: 5999 - RNA, 20 nt, synthetic construct
  source 1..20: mol_type = other RNA
gtggagcaaactaggcactg

SEQ ID NO: 6000 - RNA, 20 nt, synthetic construct
  source 1..20: mol_type = other RNA
gtggagcaaactaggcactg

SEQ ID NO: 6001 - RNA, 20 nt, synthetic construct
  source 1..20: mol_type = other RNA
gtggagcaaactaggcactg

SEQ ID NO: 6002 - RNA, 20 nt, synthetic construct
  source 1..20: mol_type = other RNA
gtggagcaaactaggcactg

SEQ ID NO: 6003 - RNA, 20 nt, synthetic construct
  source 1..20: mol_type = other RNA
gtggagcaaactaggcactg

SEQ ID NO: 6004 - RNA, 20 nt, synthetic construct
  source 1..20: mol_type = other RNA
gtggagcaaactaggcactg

SEQ ID NO: 6005 - RNA, 20 nt, synthetic construct
  source 1..20: mol_type = other RNA
gtggagcaaactaggcactg

SEQ ID NO: 6006 - RNA, 20 nt, synthetic construct
  source 1..20: mol_type = other RNA
gtggagcaaactaggcactg

SEQ ID NO: 6007 - RNA, 20 nt, synthetic construct
  source 1..20: mol_type = other RNA
gtggagcaaactaggcactg

SEQ ID NO: 6008 - RNA, 20 nt, synthetic construct
  source 1..20: mol_type = other RNA
gtggagcaaactaggcactg

SEQ ID NO: 6009 - RNA, 20 nt, synthetic construct
  source 1..20: mol_type = other RNA
gtggagcaaactaggcactg

SEQ ID NO: 6010 - RNA, 20 nt, synthetic construct
  source 1..20: mol_type = other RNA
gtggagcaaactaggcactg

SEQ ID NO: 6011 - RNA, 20 nt, synthetic construct
  source 1..20: mol_type = other RNA
gtggagcaaactaggcactg

SEQ ID NO: 6012 - RNA, 20 nt, synthetic construct
  source 1..20: mol_type = other RNA
gtggagcaaactaggcactg

SEQ ID NO: 6013 - RNA, 20 nt, synthetic construct
  source 1..20: mol_type = other RNA
gtggagcaaactaggcactg

SEQ ID NO: 6014 - RNA, 20 nt, synthetic construct
  source 1..20: mol_type = other RNA
gtggagcaaactaggcactg

SEQ ID NO: 6015 - RNA, 20 nt, synthetic construct
  source 1..20: mol_type = other RNA
gtggagcaaactaggcactg

SEQ ID NO: 6016 - RNA, 20 nt, synthetic construct
  source 1..20: mol_type = other RNA
gtggagcaaactaggcactg

SEQ ID NO: 6017 - RNA, 20 nt, synthetic construct
  source 1..20: mol_type = other RNA
tgttttgcttggtcaagagg

SEQ ID NO: 6018 - RNA, 20 nt, synthetic construct
  source 1..20: mol_type = other RNA
gtgaggcatcaggtaagttc

SEQ ID NO: 6019 - RNA, 20 nt, synthetic construct
  source 1..20: mol_type = other RNA
gtgaggcatcaggtaagttc

SEQ ID NO: 6020 - RNA, 20 nt, synthetic construct
  source 1..20: mol_type = other RNA
gtgaggcatcaggtaagttc

SEQ ID NO: 6021 - RNA, 20 nt, synthetic construct
  source 1..20: mol_type = other RNA
gtgaggcatcaggtaagttc

SEQ ID NO: 6022 - RNA, 20 nt, synthetic construct
  source 1..20: mol_type = other RNA
  modified_base 1..20: mod_base = OTHER; note = Phosphorothioate linkage
  modified_base 1..3: mod_base = OTHER; note = 2'-O-(2-methoxyethyl) ribonucleotide
tggcgttattaattctacag

SEQ ID NO: 6023 - RNA, 20 nt, synthetic construct
  source 1..20: mol_type = other RNA
  modified_base 1..20: mod_base = OTHER; note = Phosphorothioate linkage
  modified_base 1..20: mod_base = OTHER; note = 2'-O-(2-methoxyethyl) ribonucleotide
gttattaattctacagaggg

SEQ ID NO: 6024 - RNA, 20 nt, synthetic construct
  source 1..20: mol_type = other RNA
  modified_base 1..20: mod_base = OTHER; note = Phosphorothioate linkage
  modified_base 1..20: mod_base = OTHER; note = 2'-O-(2-methoxyethyl) ribonucleotide
  modified_base 1: mod_base = OTHER; note = 5-methyl cytidine
  modified_base 5..6: mod_base = OTHER; note = 5-methyl cytidine
  modified_base 7: mod_base = OTHER; note = 5-methyl cytidine
ttagtcttatttggcgttat

SEQ ID NO: 6025 - RNA, 20 nt, synthetic construct
  source 1..20: mol_type = other RNA
  modified_base 1..20: mod_base = OTHER; note = Phosphorothioate linkage
  modified_base 1..20: mod_base = OTHER; note = 2'-O-(2-methoxyethyl) ribonucleotide
  modified_base 1: mod_base = OTHER; note = 5-methyl cytidine
  modified_base 5..6: mod_base = OTHER; note = 5-methyl cytidine
  modified_base 10..11: mod_base = OTHER; note = 5-methyl cytidine
  modified_base 13: mod_base = OTHER; note = 5-methyl cytidine
tggcgttattaattctacag

SEQ ID NO: 6026 - RNA, 20 nt, synthetic construct
  source 1..20: mol_type = other RNA
  modified_base 1..20: mod_base = OTHER; note = Phosphorothioate linkage
  modified_base 1..20: mod_base = OTHER; note = 2'-O-(2-methoxyethyl) ribonucleotide
  modified_base 3: mod_base = OTHER; note = 5-methyl cytidine
  modified_base 5: mod_base = OTHER; note = 5-methyl cytidine
  modified_base 9..10: mod_base = OTHER; note = 5-methyl cytidine
  modified_base 14..15: mod_base = OTHER; note = 5-methyl cytidine
  modified_base 17: mod_base = OTHER; note = 5-methyl cytidine
tggcgttattaattctacag

SEQ ID NO: 6027 - DNA, 20 bp, synthetic construct
  source 1..20: mol_type = other DNA
  modified_base 1..20: mod_base = OTHER; note = Phosphorothioate linkage
  modified_base 1..3: mod_base = OTHER; note = 2'-O-(2-methoxyethyl) ribonucleotide
  modified_base 4: mod_base = OTHER; note = Locked nucleic acid
  modified_base 5: mod_base = OTHER; note = 2'-O-(2-methoxyethyl) ribonucleotide
  misc_feature 1..5: note = RNA
  misc_feature 6..7: note = DNA
  modified_base 8: mod_base = OTHER; note = Locked nucleic acid
  misc_feature 8: note = RNA
  misc_feature 9..11: note = DNA
  modified_base 12: mod_base = OTHER; note = Locked nucleic acid
  misc_feature 12: note = RNA
  misc_feature 13..15: note = DNA
  modified_base 16: mod_base = OTHER; note = Locked nucleic acid
  misc_feature 16..20: note = RNA
  modified_base 17..20: mod_base = OTHER; note = 2'-O-(2-methoxyethyl) ribonucleotide
tggcgttattaattctacag

SEQ ID NO: 6028 - DNA, 20 bp, synthetic construct
  source 1..20: mol_type = other DNA
  modified_base 1..20: mod_base = OTHER; note = Phosphorothioate linkage
  modified_base 1..4: mod_base = OTHER; note = 2'-O-(2-methoxyethyl) ribonucleotide
  modified_base 5: mod_base = OTHER; note = Locked nucleic acid
  misc_feature 1..5: note = RNA
  misc_feature 6..8: note = DNA
  modified_base 9: mod_base = OTHER; note = Locked nucleic acid
  misc_feature 9: note = RNA
  misc_feature 10..12: note = DNA
  modified_base 13: mod_base = OTHER; note = Locked nucleic acid
  misc_feature 13: note = RNA
  misc_feature 14..15: note = DNA
  modified_base 16: mod_base = OTHER; note = 2'-O-(2-methoxyethyl) ribonucleotide
  misc_feature 16..20: note = RNA
  modified_base 17: mod_base = OTHER; note = Locked nucleic acid
  modified_base 18..20: mod_base = OTHER; note = 2'-O-(2-methoxyethyl) ribonucleotide
tggcgttattaattctacag

SEQ ID NO: 6029 - RNA, 20 nt, synthetic construct
  source 1..20: mol_type = other RNA
  modified_base 1..20: mod_base = OTHER; note = Phosphorothioate linkage
  modified_base 1..4: mod_base = OTHER; note = 2'-O-(2-methoxyethyl) ribonucleotide
  modified_base 5: mod_base = OTHER; note = Locked nucleic acid
  modified_base 6..8: mod_base = OTHER; note = 2'-O-(2-methoxyethyl) ribonucleotide
  modified_base 9: mod_base = OTHER; note = Locked nucleic acid
  modified_base 10..12: mod_base = OTHER; note = 2'-O-(2-methoxyethyl) ribonucleotide
  modified_base 13: mod_base = OTHER; note = Locked nucleic acid
  modified_base 14..16: mod_base = OTHER; note = 2'-O-(2-methoxyethyl) ribonucleotide
  modified_base 17: mod_base = OTHER; note = Locked nucleic acid
  modified_base 18..20: mod_base = OTHER; note = 2'-O-(2-methoxyethyl) ribonucleotide
tggcgttattaattctacag

SEQ ID NO: 6030 - RNA, 20 nt, synthetic construct
  source 1..20: mol_type = other RNA
  modified_base 1..20: mod_base = OTHER; note = Phosphorothioate linkage
  modified_base 1..20: mod_base = OTHER; note = 2'-O-(2-methoxyethyl) ribonucleotide
  modified_base 6: mod_base = OTHER; note = 5-methyl cytidine
  modified_base 8..10: mod_base = OTHER; note = 5-methyl cytidine
  modified_base 15: mod_base = OTHER; note = 5-methyl cytidine
tggcgttattaattctacag

SEQ ID NO: 6031 - RNA, 20 nt, synthetic construct
  source 1..20: mol_type = other RNA
  modified_base 1..20: mod_base = OTHER; note = Phosphorothioate linkage
  modified_base 1..20: mod_base = OTHER; note = 2'-O-(2-methoxyethyl) ribonucleotide
  modified_base 2: mod_base = OTHER; note = 5-methyl cytidine
  modified_base 9: mod_base = OTHER; note = 5-methyl cytidine
  modified_base 12: mod_base = OTHER; note = 5-methyl cytidine
  modified_base 15..16: mod_base = OTHER; note = 5-methyl cytidine
tggcgttattaattctacag

SEQ ID NO: 6032 - RNA, 20 nt, synthetic construct
  source 1..20: mol_type = other RNA
  modified_base 1..20: mod_base = OTHER; note = Phosphorothioate linkage
  modified_base 1..20: mod_base = OTHER; note = 2'-O-(2-methoxyethyl) ribonucleotide
  modified_base 5: mod_base = OTHER; note = 5-methyl cytidine
  modified_base 7..9: mod_base = OTHER; note = 5-methyl cytidine
  modified_base 14: mod_base = OTHER; note = 5-methyl cytidine
tggcgttattaattctacag

SEQ ID NO: 6033 - DNA, 20 bp, synthetic construct
  source 1..20: mol_type = other DNA
  modified_base 1..20: mod_base = OTHER; note = Phosphorothioate linkage
  modified_base 1..3: mod_base = OTHER; note = 2'-O-(2-methoxyethyl) ribonucleotide
  modified_base 4: mod_base = OTHER; note = Locked nucleic acid
  modified_base 5: mod_base = OTHER; note = 2'-O-(2-methoxyethyl) ribonucleotide
  misc_feature 1..5: note = RNA
  misc_feature 6..7: note = DNA
  modified_base 8: mod_base = OTHER; note = Locked nucleic acid
  misc_feature 8: note = RNA
  misc_feature 9..11: note = DNA
  modified_base 12: mod_base = OTHER; note = Locked nucleic acid
  misc_feature 12: note = RNA
  misc_feature 13..15: note = DNA
  modified_base 16: mod_base = OTHER; note = Locked nucleic acid
  misc_feature 16..20: note = RNA
  modified_base 17..20: mod_base = OTHER; note = 2'-O-(2-methoxyethyl) ribonucleotide
  modified_base 6: mod_base = OTHER; note = 5-methyl cytidine
  modified_base 8..10: mod_base = OTHER; note = 5-methyl cytidine
  modified_base 15: mod_base = OTHER; note = 5-methyl cytidine
gtggagcaaactaggcactg

What is claimed is:

1. An antisense oligonucleotide (ASO) complementary to at least 8 contiguous nucleotides of a regulatory RNA of human ABCB11, wherein the regulatory RNA has a nucleotide sequence selected from the group consisting of SEQ ID NOs: 1-5 and 7-10.

2. The ASO of claim 1, wherein the ASO is complementary to a sequence in the regRNA that is no more than 200 nucleotides from the 3′ end of the regRNA.

3. The ASO of claim 1, wherein the ASO is complementary to a sequence in the regRNA that is no more than 200 nucleotides from the 5′ end of the regRNA.

4. The ASO of claims 1-3, wherein the regRNA is not a polyadenylated RNA.

5. The ASO of any one of claims 1-4, wherein the regulatory RNA has a nucleotide sequence of SEQ ID NO: 1, and the ASO comprises a nucleotide sequence selected from the group consisting of SEQ ID NOs: 104-138, 217-272, 516-528, 645-1517, 5610-5644, 5723-5778, and 6018-6021.

6. The ASO of any one of claims 1-4, wherein the regulatory RNA has a nucleotide sequence of SEQ ID NO: 2, and the ASO comprises a nucleotide sequence selected from the group consisting of SEQ ID NOs: 14-103, 273-381, 390-407, 463, 467-478, 515, 644, 1518-2057, 5520-5609, 5779-5887, 5896-5913, 5969, 5971-5980, and 6017.

7. The ASO of any one of claims 1-4, wherein the regulatory RNA has a nucleotide sequence of SEQ ID NO: 3, and the ASO comprises a nucleotide sequence selected from the group consisting of SEQ ID NOs: 14-103, 139-148, 273-407, 463, 467-478, 515, 530-623, 625-644, 1518-2308, 5520-5609, 5645-5654, 5779-5913, 5969, 5971-5980, and 6017.

8. The ASO of any one of claims 1-4, wherein the regulatory RNA has a nucleotide sequence of SEQ ID NO: 4, and the ASO comprises a nucleotide sequence selected from the group consisting of SEQ ID NOs: 149-168, 408-462, 464, 479-514, 2309-3956, 5655-5674, 5914-5968, 5970, and 5981-6016.

9. The ASO of any one of claims 1-4, wherein the regulatory RNA has a nucleotide sequence of SEQ ID NO: 5, and the ASO comprises a nucleotide sequence selected from the group consisting of SEQ ID NOs: 169-216, 4062-5228, and 5675-5722.

10. The ASO of any one of claims 1-4, wherein the regulatory RNA has a nucleotide sequence of SEQ ID NO: 7, and the ASO comprises a nucleotide sequence selected from the group consisting of SEQ ID NOs: 645-954.

11. The ASO of any one of claims 1-4, wherein the regulatory RNA has a nucleotide sequence of SEQ ID NO: 8, and the ASO comprises a nucleotide sequence selected from the group consisting of SEQ ID NOs: 2309-2806.

12. The ASO of any one of claims 1-4, wherein the regulatory RNA has a nucleotide sequence of SEQ ID NO: 9, and the ASO comprises a nucleotide sequence selected from the group consisting of SEQ ID NOs: 3957-4061.

13. The ASO of any one of claims 1-4, wherein the regulatory RNA has a nucleotide sequence of SEQ ID NO: 10, and the ASO comprises a nucleotide sequence selected from the group consisting of SEQ ID NOs: 5229-5519.

14. The ASO of any one of claims 1-13, wherein the ASO is no more than 50, 40, 30, 25, 20, or 16 nucleotides in length.

15. The ASO of any one of claims 1-14, wherein the ASO comprises a RNA polynucleotide comprising one or more chemical modifications.

16. The ASO of claim 15, wherein at least 3, 4, or 5 nucleotides at the 5′ end and at least 3, 4, or 5 nucleotides at the 3′ end of the ASO comprise ribonucleotides with one or more chemical modifications.

17. The ASO of claim 15 or 16, wherein the one or more chemical modifications comprise a nucleotide sugar modification comprising one or more of 2′-O—C1-4alkyl such as 2′-O-methyl (2′-OMe), 2′-deoxy (2′-H), 2′-O—C1-3alkyl-O—C1-3alkyl such as 2′-methoxyethyl (“2′-MOE”), 2′-fluoro (“2′-F”), 2′-amino (“2′—NH2”), 2′-arabinosyl (“2′-arabino”) nucleotide, 2′-F-arabinosyl (“2′-F-arabino”) nucleotide, 2′-locked nucleic acid (“LNA”) nucleotide, 2′-amido bridge nucleic acid (AmNA), 2′-unlocked nucleic acid (“ULNA”) nucleotide, a sugar in L form (“L-sugar”), 4′-thioribosyl nucleotide, constrained ethyl (CET), 2′-fluoro-arabino (FANA), or thiomorpholino.

18. The ASO of any one of claims 15-17, wherein the one or more chemical modifications comprise an internucleotide linkage modification comprising one or more of phosphorothioate (“PS” or (P(S))), phosphoramidate (P(NR1R2) such as dimethylaminophosphoramidate (P(N(CH3)2)), phosphonocarboxylate (P(CH2)nCOOR) such as phosphonoacetate “PACE” (P(CH2COO—)), thiophosphonocarboxylate ((S)P(CH2)nCOOR) such as thiophosphonoacetate “thioPACE” ((S)P(CH2COO—)), alkylphosphonate (P(C1-3alkyl) such as methylphosphonate —P(CH3), boranophosphonate (P(BH3)), or phosphorodithioate (P(S)2).

19. The ASO of any one of claims 15-18, wherein the one or more chemical modifications comprise a nucleobase modification comprising one or more of 2-thiouracil (“2-thioU”), 2-thiocytosine (“2-thioC”), 4-thiouracil (“4-thioU”), 6-thioguanine (“6-thioG”), 2-aminoadenine (“2-aminoA”), 2-aminopurine, pseudouracil, hypoxanthine, 7-deazaguanine, 7-deaza-8-azaguanine, 7-deazaadenine, 7-deaza-8-azaadenine, 5-methylcytosine (“5-methylC”), 5-methyluracil (“5-methylU”), 5-hydroxymethylcytosine, 5-hydroxymethyluracil, 5,6-dehydrouracil, 5-propynylcytosine, 5-propynyluracil, 5-ethynylcytosine, 5-ethynyluracil, 5-allyluracil (“5-allylU”), 5-allylcytosine (“5-allylC”), 5-aminoallyluracil (“5-aminoallylU”), 5-aminoallyl-cytosine (“5-aminoallylC”), an abasic nucleotide, Z base, P base, Unstructured Nucleic Acid (“UNA”), isoguanine (“isoG”), isocytosine (“isoC”) a glycerol nucleic acid (GNA), glycerol nucleic acid (GNA), or thiophosphoramidate morpholinos (TMOs).

20. The ASO of any one of claims 15-19, wherein the one or more chemical modifications comprise 2′-O-methoxyethyl, 5-methyl on cytidine, locked nucleic acid (LNA), phosphodiester (PO) internucleotide bond, or phosphorothioate (PS) internucleotide bond.

21. The ASO of any one of claims 15-20, wherein the ASO further comprises a GalNAc moiety, optionally a GalNAc3 moiety.

22. The ASO of any one of claims 15-21, wherein the ASO does not comprise 10 or more contiguous nucleotides of unmodified DNA.

23. The ASO of claim 22, wherein the ASO does not comprise a deoxyribonucleotide.

24. The ASO of any one of claims 15-23, wherein the ASO does not comprise an unmodified ribonucleotide.

25. The ASO of any one of claims 15-24, wherein the length of the ASO is 5×n+5 nucleotides (n is an integer of 3 or greater), wherein the nucleotides at positions 5×m are ribonucleotides modified by LNA (m is an integer from 1 to n) and the nucleotides at the remaining positions are ribonucleotides modified by 2′-O-methoxyethyl.

26. The ASO of any one of claims 15-24, wherein the length of the ASO is 3×n+2 nucleotides (n is an integer of 6 or greater), wherein the nucleotides at positions 3×m are ribonucleotides modified by LNA (m is an integer from 1 to n) and the nucleotides at the remaining positions are ribonucleotides modified by 2′-O-methoxyethyl.

27. The ASO of any one of claims 15-24, wherein each ribonucleotide of the ASO is modified by 2′-O-methoxyethyl.

28. The ASO of any one of claims 15-24, wherein each nucleotide of the ASO is a ribonucleotide modified by 2′-O-methoxyethyl.

29. The ASO of any one of claims 15-28, wherein the ASO comprises 10 or more contiguous nucleotides of unmodified DNA flanked by at least 3 nucleotides of modified ribonucleotides at each of the 5′ end and the 3′ end.

30. The ASO of any one of claims 15-29, wherein each cytidine in the ASO is modified by 5-methyl.

31. The ASO of any one of claims 15-30, wherein the ASO comprises 2 or more contiguous nucleotides of unmodified DNA flanked by at least 3 nucleotides of modified ribonucleotides at each of the 5′ end and the 3′ end.

32. The ASO of any one of claim 1-5 or 8-30, wherein the regRNA is an eRNA.

33. The ASO of any one of claim 1-4, 6, 7, or 14-30, wherein the regRNA is an paRNA.

34. A pharmaceutical composition comprising the ASO of any one of claims 1-33 and a pharmaceutically acceptable carrier.

35. A method of increasing transcription of ABCB11 in a human cell, the method comprising contacting the cell with the ASO of any one of claims 1-33 or the pharmaceutical composition of claim 34.

36. The method of claim 35, wherein the cell is a hepatocyte.

37. The method of claim 35 or 36, wherein the ASO increases the amount of the regulatory RNA in the cell.

38. The method of any one of claims 35-37, wherein the ASO increases the stability of the regulatory RNA in the cell.

39. The method of any one of claims 35-38, wherein the method results in increased ABCB11 mRNA in the cell.

40. The method of any one of claims 35-39, wherein the method results in increased ABCB11 protein in the cell.

41. A method of treating or preventing cholestasis in a subject, the method comprising administering to a subject in need thereof an effective amount of the ASO of any one of claims 1-33 or the pharmaceutical composition of claim 34.

42. The method of claim 41, wherein the subject has or is at risk of developing a cholestatic liver disease.

43. The method of claim 41, wherein the cholestatic liver disease is progressive familial intrahepatic cholestasis (PFIC), Alagille Syndrome (ALGS), primary sclerosing cholangitis (PSC), neonatal sclerosing cholangitis, pediatric intrahepatic cholestasis (e.g., pediatric primary intrahepatic cholestasis or pediatric secondary intrahepatic cholestasis), benign recurrent intrahepatic cholestasis (BRIC), total parenteral nutrition associated cholestasis, paraneoplastic cholestasis, Stauffer syndrome, drug-associated cholestasis, infection-associated cholestasis, biliary atresia, intrahepatic cholestasis of pregnancy, primary biliary cholangitis (PBC), Dubin-Johnson syndrome, post-Kasai biliary atresia, post-liver transplantation biliary atresia, post-liver transplantation cholestasis, post-liver transplantation associated liver disease, intestinal failure associated liver disease, bile acid mediated liver injury, MRP3 deficiency syndrome, or gallstone disease.

44. The method of any one of claims 41-43, wherein the subject has or is at risk of developing PFIC, and wherein the PFIC is PFIC type 3.

45. The method of any one of claims 41-43, wherein the subject has or is at risk of developing PBC.

46. The method of any one of claims 43-45, wherein the method results in a reduction in a symptom or a change in a disease-relevant laboratory measure of a cholestatic liver disease in the subject.

47. The method of claim 46, wherein the reduction in a symptom or change in the disease-relevant laboratory measure of cholestatic liver disease comprises a reduction in serum bile acid concentration, an increase in serum concentration of 7α-hydroxy-4-cholesten-3-one (7αC4), an increase in the ratio of serum 7αC4: serum bile acid, an increase in fecal bile acid excretion, a reduction in pruritis, a reduction in serum alanine aminotransferase (ALT) concentration, or a combination thereof.

48. The method of claim 47, wherein administration of the ASO increases ABCB11 gene expression relative a pre-administration baseline level.
